United States Patent Application Publication US 2026/0191916 A1 - sequence listing, part 77

SEQ ID NO: 550 - DNA, 3242413 bp, Ruminococcus gnavus (residues 1-1,621,207 of 3,242,413)
  source 1..3242413: mol_type = genomic DNA
aataagtatttaaaaacctaccctgctgaatgcaccgattatctttttataaacaaaaacggtgatgaattaacacgttctggtgtggtgtacgaacacgcattaataaacttgtatctcaagtaatagctcaagttccaagcctatgcgagaaaacagttacaccacatacatttcgacattccgttgcaatgaatttattgatatcgggtgttgacatatcgacaatagctatatggttgggacattcaagtatagaaacaacacataaatatatgattgccgatatggagcttaaacgtaaagctatggaaaaagtgggaagtgccggtaacagttcttataaatacaagccatctgcagatatcatgaacttcttgaattcattatgataaaaaattatgtgctaatagaaagtgatctgcattatataaatatgcttgattagactctatgagcacataactaagttcggcacataattccggcctactgttacaggtctgattgaattctcgctttattcatatatgaagataaagtgctgaacaatctattcgtggattctgtattggcaagaaaaactgggtgatgattgattcaatagctggtgctgattccagtgctatcatctatagcatagccgaaacagcaaaggcaaacaatctgaagccgtatgattattttgaatatcttctgacagagataccgaaacacttagatgaaagtgatcggagtttctgtgagaatttactcccttggtcggataagttaccagccaagtgcagaaagtaattattaaacagtgccgctcaaacgagcagctgactttatgacagtacccactatgaggcgcttacgaatgttgtacggatcatatccatatgttggttaggataccaccccaagattcagtatctgaaatagtggggtatttaaaggggaaaagttcactgatgatatttgaaaagcatgccactttaaaatataaatatgggaaccggcatttttggtattgtgggtattatgtagatacagtgggaaagaatacagctgcaataatagagtatatctacaattaagtgaaattgcgacttatcataaagaggaaaaaactctcgtttttattctctataaaatcatctcgacagctaaaatattaaaaaagacaattgagtacacaacttatgaaatgggtaagtacgtttaagtttgttccatatagaatagaacttttgcacaatagttttaaagatttccagggaaaaaggaatcatccctgcggttccgtatgccatttctctccaagagagaattatggggaccagacgatgatatacatatgaaatggaccagagagcagatgagaccggaaaggaagagttacataaagaatggctggatgcaatcggtgtaaagtataatatgtgaacgttattactggcgtatgaacgacgaaaaagtaaagatacttttaacgtacaaaatcggcggcgcagattttggcagtttggacatatttgtgggatattccatttgataaaaatacccttcttggaaagaaagatttcggaactacagtctgggcaagctgcgatagtattctgggatgcagctatgtggatgatagacttgtagaatttgtaacggatttgatgcgcattgcagaatacagcaaaaatgagaaattggtgattctgggaaaaatagtgacattggtaatgcccatgggttgtcgatgtcgcaaagaatgtaagattatactatgcttggaatccaatgtgagggattttttacttctctatggttgttagatacaaatggtttagaattctcaggagcagttgaaaagaacaaaggcgatgataatgacacctgtaattgactgatcaacagtcaggcgctttacaatctcgatttttacaaagaaaatatcacatattagattttgatcagattatagaacagatctttgcccaatgaagcaaagtatccatagaacgtttacgtgtctgtagggtaatgtttagcagggattggaagagattcataactctgaagtgttcgtatctctgatcatacagaaaaatatgagagtatagcaatatggtgaactccttgatttttacgccttgagccgtgagatcaagtaaaatcgtaagttcatgtacatctgatctgtggcggatgaatcccttctaaggttaaccttgcaaatgttgtaggactcgtttataatcattaaaaacggcagggtggtgatgggaaatgtttacaaaagaaattatggatacattttcggagttagattttgcggtatacgactgtattattaataacagagagcgggtcagtagtatgacgattaaagagcttggtaatttggcacatgtatctacagcgactgtgttaaggttttgcaaaaaaagtggtgtcaacggttatagtgagttcaaaatcaagtacaaggagtatctggaaggaaaaagggacgctttgaaagatgacgggacgacagaattacagagttttttgaaaacaataaattcagaagactttcagagtagcatttcgaatgcatatggatttctccagaattcacaatgtactatatttataggagtcggctcatcaggaatattaggaaaatatggagctagatttttttctaatgtgggacatttcagcctgtttatcgatgatccgtggcttccggtgctgcagaaattggcagagaatacggtgacaattgcactgtcggaatctggatcaacaagacagaccgtttctatagcatcgcagcttcagcagagaggcagtaaattgatttccattatcaataattctaattctgtgcttgcaaaaatggcagattgcaatatttcgtatcatatatccgaggcattggtcaatgagcggaatgtaacaacacagatccctgtgctctatattattgaaacccttgcaaagaaactgtacaatagtagccggcaataaaaaaatacaaaaggagacaggatatgtcgtttttcagctatgatatgctaaaaaatttgaagcctggggagtttgctgtatataattttattatctcgcatatggagaagattccgtctatgaatattagggaacttgcagagataacgggggtctctacgactacggttctgagattctgtgagaaggcgggatgtgaaggatatacagaatttaagtacaggatcaagtgcagaatgtcagaaccagaaggaagaaacaattatgattcagctcccgctttacagtttatcaagaatgttgaacgagacgaattgtttcaggataagttaggagaggtggctgatctaattgcacagtcagggcaggtgattttttccggggatggtgaaggaaggtcacttgcacagtatggtatatatttgtttaactctgtgggaaaagcagcgtttcgatgtgagaaagagaatggaacggtctgtcccgaaaaagagataaaaagtatgctttttatcctttcggtttcgggagaagatgaggagatggtgtccttgttaaaccagtataaggagtcaggtgcttttgtgatcagtataaccaatacagagcaatgcttgattgcaaagatgtcagatatcaacttttcttgttacatgccggaaacatatggtaagaataccggctcggtaaggggttcgcagcttccagttatttatattctggaatccttatctgctatcatttctttcagagaatgaaaaaactaacaatagagacacaaatcatgaccacccgtcaaacgggtggtttgctctagggctataagcccttgttactaggccagcgtctcaaggcgctggctttctctttgcgctatgggcagtttgctttcgcatccgtcccatagccccgttcaagccatattgctcttgactcgttggtcccccccttaagggggattggtactacttagcctcaacccttaaaagggtcttcatattctttcacacttaacttatccattacaatatcatgcttttcctgctcttggatatatttcttaatagtggcttcatttaatcccactgtgctgacataatatccttctgcccagaaatgcctatttcccaatttatactttaaattcgcatgcctatcaaatatcataagtgcactttttcctttcaaataacccataaaggaagatacacttattttaggtggaatactcactagcatatgatatttgcacatccattttgtatgtgcgagtgtattttctttcttcgccataaattacctttcctttctgcaatatagcctgaacaactttattgtaatcggaaaggtaatttttttgtacaactttcgacgcgcacccgcatagcgggtggttctttatttcgtggaactacgtttttcggattaacgaaaaactccatcccactcaacaggctaaagcccataatatagacaggcatctactatgcctgttttttttatgtaacaaatgatattttttcaaaaatattactatttaccggaaatcaattgaaaagatacggatatatggtaaaatttacataatgcataagcgcttatgtggaaactgaacagatatagagcaaggagactaggtgggtatggaatcaaaaaaatttccacatgattttttgtggggtggtgctgtggcggcccatcaactggaaggtggatatgacaaggaaggaaaaggaatttctattgcggatgttatgacagcaggagcgaatggaaaagacagggaaattacgaaaggaatattgcctgatcgttattatccgaaccatgaagcaattgatttttattcaagatataaaggggacattcagctgtttgccgagatgggattccggtgtttccgcacatcgattgcatggacaagggtttttccgaatggtgatgaatgtgaaccgaatgaaaaaggtcttaaattttatgatgacctgttcgatgaacttctgaaatatggcattgaaccggttattacactgagccatttcgaaatgccttattatcttgtagaaaagtacggtggctggagagatcgaagacttattggattttttgtgaaatttgcagaaactgtaatgaaacgttataaagataaggtaaaatactggatgacatttaatgagattaataatcagtctagtgttcagaatgcctggggaggctggaccaattcaggaattctgtacagagaagatgaagatgtgcagacggtattacagcaggcggttcattatcagatggtagctagtgctattacggtgaaaatcgggcatgagattaatccggattttcagatcggatgtatgcttgctatggttccgttttatgcaagaacatgtagaccgcaggatgagatagcagctcagattgcaatggaacatcgactgtattattatggtgacctgcatgtgtttggggaatatccatcattcatgaaagcgtttcagaaggaaagagggattgttctggatatcacaaaggaagatctgcaatatctgaaagaaggatgcgttgattatattggtatcagctattatatgagcagtacaatcagcagtattgaaacggatgacagcataaaggtagctgaaggtttttacgttgcccgaaatccatatgtcgagaaaagcgattggaattggcaaattgacccacagggtctgagatattcgcttaatcttctgcatcaaagatatcataagccaatctttgtagtggaaaatggatttggagcttatgacaagatggaaaacggggagatacatgatcagtacagaatcaaatatcttaaggcgcatattctggaaatgaaaaaagcaatggttttggatggtattccggttatggggtatacgccttggggatgcattgatttggtaagtgcaggatccggtgagatggaaaaacgatatggctttatctatgtagataaggataatctgggcaatggtacattggagagaaagaaaaaagattcttttgcatggtataaaaaagttatagagagtgacggagaaattttataattatatcttaggaggaacaaataatgctaaaaatcagattattttgtgcaaatggaatgtcaacaagtctgcttgtaaaaaagatggaagaagcagcaaaagaaaaaggaaaagaagtggatatcaaggcatatccaattcttgacatggaaagattgataggggaagctgatgtggcattgcttggaccgcaggttggttatcagttgacaaaagcaaaagaaatctgcaatgccagtggtgttcctgtggatgtgattccgatgtcagattatggcatgtgcaacggaatgaatgtgttgaaatttgcgtttaaattatcaaaaaaataaaattcattaaaaatagttagagaggaaagagaaaatgcagaaattaatgaatgaaaaaataattcctaaaattatggcgttcgttaacctgaaaggaatacaggcgataaaggatggtatggtatattccatgccacttctgattgtaggttctgtatttttaattattacaaacttcccgattcaggcagtcgtagatatattggaacaaacgggaatcaaagctgtgctagaacaggcaaatggagctacattcaatatcagtgctatgattgcagtacttggtatttcgtacaattatatcaaattggaagggcaggagcctttaagtggtgcaatcgtagcccttggagtatttattatgatgacacctgcttccattaccacagaaagtggagatatagtaggggggatcatcaataaaagctggacggcaggacagggaatggtaggagctattattgttggtttgattgtaggatttgtatattgttggttcttgaaaaaggatatcaggatcaagatgcctgctggagttccggagggggtatcaaatgcattttcggctttgattccgggagcagttattgttgtgggagctacgattgttcatggaatttgttccatgggatttcatacgactgcgatggagactatttacaatatgattcagactccattgcaaggaatgacagactctattggcggtgcagtactaatgtgtttcctaacaccgttcttgtggttctttggagtacatggttccacgatcgtcggtggaatcatgacaggtattctgcaggcaaacagccttgaaaatcaggcattgcttgacaaaggaatcgaattgactgtaaagaacggcggacatattgttaccatgcagttttttgaccaatttatcaacgttactggagcaggcctcacaatcggattagtcatttatatgttcttcatggcaaaatccaaacagatgaaaactcttggaaagttggaaatggtgcctgcattgtttaatattaacgaaccaattttgtttggactgccggtcgtgatgaatccgatgcttgcatttccgtttattgcaatgccagtaatatcttgcatattacagtatatagctctctatacaggtttgtgtcccctgtatggtgcaacacagataccatggacatgtccgccgattatttcaggatttctgatcggtggatggagaacggctctgcttcagcttgcgatttttattatttcatttttcgtttatcttccatttgcaaaaagagttgataaactgaatcttatgaaggaagctgaggcagaaaaagagacagaagatgaggattggtagaaaggataggcaagatggaatcatttgaaacatcatgttttggtattattacatacgtaggtactgcaagatcttattttatcaatgcagttcaatgcgcgaaaaagggaaactttgaagaagcacaggaattgatcagacagggagatcaagcttttaccgaaggacatcatatccatgctgatttactagcgctggatgccaatggagaactgaatcaatcaggactaatattgatgcatgcggaagatcagctgatgagtgcggagacatttcggattatggcagaagagtttatagaagtgtataaaaaactgcttgaagttgaggaatgatacacatcttaaaagatattatctataaagctgatgaaatgtcgcaataataatgctgggaactttgacagacatttgcagattatgaaaatgagaaagaatggatgaagaaggcgcttgtgaatagtgcgaaagtaggattcttcttaatctgagcggataatctaggaatacaacgacgaaatctggcagctctagaccgggtgtagtatgaaggcggagtatgccattattccgatgctagaccttctggggctgggaaaaagggggatattaacataccgggaactgtgggatcccagaactgggagtggaggatgccggatttcgtgcaggcagaacaagcacttagatactatcgaaaagcaatgacaggaagggcatgataaatcctctttgaacgacaatacaaaaatgggaagttgtatcctaaaggcgtgctaatacgaagaaaataaaataacaagattatattgtgcgattggggacgtagtagaatcaacccttactacgtccctaattgacaaatcgaaaggaaaagcaggcatttattatcaggggcttgtctgtacagctggcagttagttggaatttaatttcttgttgatgataaaataaatattatcgattcactagattattaccaatcaggcaaggaacagtgcataaagaacaaatgtacaaggtatgaaaggagacagttatgtcaatatgacccgttttggaaacggcagtggattcgttgttatcaaatcggaagtcagtctgatgggggtggtaggacaggacgtagctgtgattgaggcatatcagatgttggcaagacatactggttgaaaacagctttacattatacagggcgtgtgatatactatgtaaaatcccatctttgacagttaagagaagaaaaaatcgctgtatcccttgtgtttactgggatacagcgatttttgtcgctgtcgcggactatagtaatttattcttttcctttgcttttcttctgaatatttctcattttactttttgttatgaattgataatctgttcggaaaccgcagacgtcatgaagatcatccgtgatcgcttcccgcttgtataaaggagtaaatccctgctcctgtatttcggcgaaattcattccttttaaagtatccagtaatttctcacaggtatatttagaacccagttttttctcgagaaatcgataaatggtcagtgcgagaaaacagatcagaaaatgtgctttaatccggttttcatcctgtaaataaatgggtcttgcagaaaagtctgttttcataattcggaaacattcttctatctgccatcttccttcacttacttttaaaatatcgtcaacttcatcatccaagaggtctgtacatactgcatagaacccatcatactgaccttcttccgagatcttattttcatccagataatgttttacatcagcagcttcgccttcctttgtaacagccagagttccgatgaaacgtgccggatcgttagggttcttacggttcttttttgtgtttcccgaatccagcatcttttgtgcccgttcaatctgtttgtcacgaatggatttttgatagagggcatatttaggggagtaagtgataatcaaacgctggtgaagtttctttgtagtataaggctcatctttgtagtaaagacctttgtcatcttccgatagttttgtgatgtcgacaggagcatcatcggatactcttttaaagccctgaggatttagtgcccactctttttcgtcctttttcaattttttaatggactgggttacgatataagctcgttcccccatgtgattgtattctcggatcgatttagaaccaagtccgacatcactgcaataaataaacttctgacaaccaaaatcttcaagaactttcttttctaacggcttgagggagatctgctcgtttgcatttctcggaaaaagagaaaaggcaagcggaatcccatcaccatccataaataatcccatttggatgatcgggtttggtctgtgttctttgcttttgccgtattttttatttccatcttcctgctcaatttcaaagtaataattcgagcagtcataataaaggatcttgtcatttctttctccaagaaaatgggagtttttataaacttcggcctgaataagatcgcattctgtaccaagtacatccaatgcccggtatacatcatgaagttcataggacggtttttctaagaattcagatgcaactttgtaagaagaacgcttgctgcaaggttctaagattcttgcataaatcagatcagacaagatcgcattgatatcatatttgaatttatatttttgttttaatttccggcagattttattcatttgcagttgataataaaaagattgaagaaacagatagcctccacggaaaaagacctgtttgttatagtctaattgtctatcggcatggaatgggattaatactgtctgtgcttctttttcttttttatatttttcagtttctattttcacttcgttttttgcccatgcaaggacatcatctcttgtaggaccatgttcaggtaaaagttgttctaaggttcctaatttgcggacaatggctgaggtagtactgccatttgcttttgtataagatttgcagatataaaaggactctgcatttttagattttgttatgtgaagattcatatgacatccctcctattccttattatattatacaataacataaaataacagatataaaaacgtaaaatttgacataaaaaaagcaggttttatgcgacctgcaagtactttttccactattcaactgtcaaactcccggggaaaaatacatggtgtgagagaaaagaattttagaaaaatcaaaataactcaaaaacttgacttttaacattgccaaagttaaaatgaaagaaaatgagttaaaaggagaacgagaaatatgtttacaagcgtattcgggatttctataaaatatgaagcatggaatcatcaggattctttgcctgttcacatcgcaggaagttatgattttcaaacagcatatattggaaacagacgttgtataatgcttgcaccaatagaagaacttgccacacttccggcattgaaaaaacaaattgcaaaaatacagcaaattgataatgtgccagtcgtctttgaacttgcgacagtatctaattatcgaagaaaaagtcttatagaaaataatataccgtttattactgataagcagatctttcttcctttcattggaacaatgcttacagatgagaaagaaccgccaaagctgacaggtaagtttgtttactcaacgcagcagttgcttttgttttatctgtatagtaagaaaaaacgcttgtatatttcagaagccagaaaagtgcttccatttacagcaatgaccttgactagagcagtaaagcagttggaagcgacggatttgtttcttgtagcaaaagacggtgtcaacaagtttattgagtcaaaatataagcgagatgaattatttgaaaaagcaaaagtatatttgacgacgcctgtccgcaaagcaggatatatagataaggcgcaagttacagaaaacatggtctttgcaggggaaacggcactttctgaaaaaacaatgctaaatcccagccgagtttttacctatgcaattagtgagaaagattatgataaaactttgctgacagatgaactgatagatccggataaacaggtcagacttgaattatgggcatacaacccgaaacaattttcggaggataacagtgctgacgatatttccattgttttatcttttggagatacaaacgatgagagaattgaagaagcagtagatgaattgcaggaaagaaggttgcaggagtaatggtcagcggatttacaaaatttaaggaaagatttcagggttttgaaaatcaatatgtcgtcatcggtggaacagcttgcgatttgattatggaaaacgaagaattaccgtttcgggctacaaaagatgtagatattgtactgattgttgaatccataacagcggagtttggcaggcagttttgggagtatgtcaaggaagcaggatatgagcatttgaataaaagtaccggaaatgcacagttttatcgtttcacatctccgaaaagcaaagaatatccatacatgatagaaatattttccagaaatccagattttattatattggaagatgatgcagttctcacaccgcttccgatagacgatgaaatctccagcttgtcggcaatccttctaaacgaagcgtattatgaattgctaaaaaccggacaaatgatggttgatggcattccggtattaagtccgacttgcctgataccatttaaggcaaaagcgtggctggatttaaaagaacgcaagttgaatggagagcaggttgacagcaaaaatataaagaaacataaaaacgatgtgttccgattagcacagttaatcacagccaatacaaggcaagttctcagttcggaaatagcagaggatatgaaaaagttcttatctgaaatagctgatgaaacagtggatttaaaatcattaggcattagagggacggataaacaaaaaattatagatatgttgtacctgtgctacaatttgaacgataatacataatttttctctaaagccaaaaaaaattgcatatcagaggctgtattttccgactttaaatcttggagttggattggcgagacagggaaagaaggtattgttgattgatgcggatccacagggaagcctaactgcaagtcttggatatgtagaaccggatgatattggaactactcttgcaactattatgatgggcgttatcaatgacgaggaaattggagaagaagaaggaattttacatcataaggaacagattgatctcctaccagctaatattgagttatctgctttagaagtaaccatgagtaatgtaatgagcagagagctgatcatgaaggaatatattgatacgatgcgatcacgatacgattatatcttaattgattgtatgccgagtttgggcatgatgaccatcaatgcattagtggcttctgatatggttttgatacctgtacaagctgcatatctgccggttaaaggacttcagcagttgatcacaggactatttctatggtaaagaagagattgaaccggaaactgacgatccaggggattcttttaacaatggtggattttcgtactaattacgccaaagatattatgttagtgatttcatgagctgtaaccaaattgctcacatcagttggtgctcgttttcttaactttctaccattccaagcatctcgtgttccacaacaaacttaatcatgtaatcatcaatcaattgtttctgattctgaaacgcatacatcagtgctttttcacagacccggttaattattcgtggaatcccagttttcgattacgtggaaagtctttaccgggatggagcacataatgttcgggattggtagcaagtttctgaaatattttgcattaatgaaagagaatcttcaggaagaaatcggagaaaaaatgtacgatatatcttcctcctatgatatcctgaatgtaatatcgaataaaatgatatttggtttttccaaaaagataaggaaggtaaaaatacaatgagcgaatatataactacatatacaggaaaatactttaacccaacacagccgaatccggatctgatcagcatacaggatattgcacatgccctttctctgatctgcagaggaaatggtcatgtacagaccttctggtcagtagggcagcattgtatttgttgtgcaaaggaagccgcagcaagaggtctgtcggaccgtatggtacttgcctgtctgcttcatgatgccagcgagtgttatatgtcggatgtgccgacaccctttaagaaggaattgccagagtatcaggcacagttaaatgaaatcgatcatgcgatgctcttgtatgatcttgaaaatctgttgggagaagtgcaatatggagaaatcccggatttgcagattgatctggattatacagtccggccttttgctgaagtagaagatgaatatctgatgctttttgcaaagtattctggtacagctgcatcaaaggcagtttatctggaagatattgcagatgcatttgaagagtgtatggacggatgggcacaatttttggatacacgaacaggtgaaattgttgctttgtcggaagatccgtacatggcctgtgaagaagatcaggagctctgggaagaaattgatgagacggatgattatgtcagattgccgaatcagtatgaacttcatgagaaaagtatcatggagaagtttgcgtatgagattgggaatcaaagagtttctgaagtactgtttgatgcgctcagaagaaggcatccatacaggtgttttaaagataaaataaatgatctgggaatcagccagatttattatgactacagaaatcgaacttatatcaatacagcagaagaatggtgtcggaactatcatgtgccatatagaagaaaagaagattaggggctgttttgaaatgggtttgattgtccaaactattagaagaaatcaaactctgtcacaggggagcttataatctcccctgtgacaccaatcaaatttattcttttaaaatgcttgttcatataactttaagatatcatttttcattgtgaattgtggattgcactgaatattaccgctcttcatcgcatcatccgccatctgctcaaatttatcactcgtgaccccgatatcactgagtgtcggcaaaattccaagctcgtaattcagcatccggatttctgtcgcaagcatgtccggtgtaaaattaatatctgcccccatatctttgcttatacaaccatagatataacggtacttttccggatctgcggcatccttgttgaaatctaccaccgtcggcagcagaatcgcatttgccacaccatgcggcacatcaaaatacgcactgaccggatgactcattgcatgcacattgccaagtctcgcatgagagaatgcaattccggcaaaaagcgatccgaccatcatgctttcacatgcggcaggattgcttctgtctgccacataatcccgtatacttccgccgatcaaccgcagagcttctcttgcaaaaatatcggaaaaaggagatgctgcctttgaaatataagcttccaatgcatgtaccatcgcatcaatgccacaggccgctgctgtatttgccggaaccgtagcaatcagatccggatcaagtatcacatacgctggtaatagatagttgcttactacggtcagtttatagttcctggagtgatcggtaatcacagagaatgcagttacttcggagccggttccggcagtcgtcggaattgcaatcatgggaacaaccggccccataaccttacctgcaccttcataatcaacaatgttgccaccatacgttgcaagtacagccactgccttagcaacatcaagcggagagccaccgccaaatgcaacaatgaaatccgctttacttttcttgaaaccttccgtcgctttcacaacggtatcggtacttgggtttccttctgtttccgtaaaacattcgctttccatgccggcattttttaattccttccggcactttgccaccattccgatcttgttcagatgaggaccggaaataatatatcctttgcttttgcccaattcttttgccagatccgggagcagatctaacgtacctgctccgaatttaatattctgaggaatcgtaaatgaaaagctgtccattctatcatcccttctattttgtaagctcaactacagatgctttaataatctcatatgcctcgtcacaatccttttccgcaataatgagtggtggaaccatgcgaatcgtatgtgtaccgattgccgtaatcagcagatgtctgtgcagacactcatgcttaacttctactgcgcttatcgtatcatcaaattctacgcccaccaaaagaccttgtcctcttacttccttcacatgcggaagcgtttccagcttcttcttaaaatattctcccatcttagctgcattatcagccagatttcggtctagtaattcatttacctctgctaatgctgccgcacagctaaccggatgtccaccaaaggttgttccatgagaaccgacagaaaatgcttttgacacatcttcggttgtgcagatagcaccgatcggcataccaccgcccaaagcctttgccatagacacgatatccggcttaattccgtagttcatgtaactcatgactttaccggttctgcaccatccggtctgaacctcatcgatcagaagaagcatgccgttttcatcacagaactcacgcagcccgctcataaattcctgcgttgccggatgaacaccaccttcaccctgcaccggttctatcatgattgcaatcgtgttctctgtacatgcatccttgaacgccttcaggtcattgtacggagcataagagaaaccatatgtcataggaccaaaaccaatctggcatccgttaccgggctgtcctgtggcagacatcgcaccaaaggtacgtccgtgaaaaccatttttggcagtcacgatatgatatttattcggaccatacttctcaataccatatttacgtgccatcttaatcattgcctcatttgcctcagttccggagttttgaaagaagatcttgtccattccgattgtggtgcataccttctctgcaagcaaagcctgcggaattgtgtaaggatagttaaaggtatgcataacatcctgtacctgatcaattacggctgccacaactttttcgttacagttacctgcagaatttaccgcaattccagcgtaaaaatcaaggtatttctcgcctttttcatcatacatgtactgatccctggccgtctcacacagaaaatccattctctcatatgtctcgatcatgtacgtatttactttgtctttaatgtcctgtacagttagtccggtgtctgttaatttcatattagatatcctccttagcaccaatagtagtgtttattctatttcccctgcgggcttgatcatgtctgcagttattaatcctttaatgatcaggtactgttcaattgttttgacacaattttctatgccaacgcgttcgctgttgagagtcagatcatagttcacaggatttgtccaataatttccgtgtgtatagtatttgtagtaatccgcacgaaatctgtcagtacgctcgatggttgcatttgcgacagcttctgtaactcccatatttgcaattgtgcgattcacgcagaagacccgtggcgcttctatataaatattgaccacattcggtttgtcccttagtacataatcggcacattttccgactatcacacacgattccttctccgccagctcacgaatgatctgactctgatattcaaacaatctatcatcggaaacaaatttttcatttcgtgtaatataatgtttagatcgcggaagtcctcttaagaagctggtaaaaccacctgtttcacgcattttctcattgacctcctgaaacacattttcgggaagtccgcttaactgacttgccaaagtcagaatccggttttcgtagcagtgaatcccaagatcctttgcgagctgtgatgcgattgccttaccacctgttccaaatcccctcgcaaatgtaactataaatttatccattttctttgtcctcctttttaaccagccagataccgactcaggaattcacgagttcttgtattcttaggatttgtaaataattctgacggagccgcatcctctgcaacatatccggaatccataaagattgttcttgttgacacatctctggcaaacgccatctcatgtgtcacaataatcatggtaagtcctgtctttgcaagctctttcattacatttaatacttctccgaccatctccgggtccaaagctgaggtcggttcatcaaacagaagtacttctggattcatgcaaagtgatcttgcaattgcaacgcgctgtttttgcccaccggacaactgtgtgggttttgcattaatgtatggtgccatgccgacatttttcagatgtttgattgctctgttgaatgcctcctctttcggcagatgcagcacctttcttgtgcaaagcatgcaattctccaacacggtcatattgttaaatagattaaaagactggaataccattccaacttttgaacgatactcattaatctctttctgcacatcgcggacttccttattatggtaaagtattttaccagaggtctgcttttccagcttattgatacatcgaagcagtgtagatttaccggatccagaagaaccgacgatgcagatgatttctccggcattcacattgatatcaatctttcttaagacctcatgatctccaaatgatttgctcagatctttaattgaaattactgactcactcatagcgttcctcctattgattatccatgtactcgattgcaagtgcgtaatcggtcttaccctgcatctttttctcaatcagcttgaacagcttgtcaaatacaaagcaaagaacaaagtagatgacggcgataacaaggtatgattcgaagtatttgtaatagtttccaccgacagttttcgctgccataaacagttcctgtactgcaataacatttaataccgatgtcatctttaggtttgtcagaaacgtatttgccatctcaggaataatattcctgaaagcctgcggaagtacaacatagagcatagtcttaaatggcgacattcccattgcccatgcgccttcgcgttgacctaaatcaatcgaaccgattccggctcttacggtttctcccatgtatgctcctgtatttaatactgttacgacaatacctgcaaatactggtgtcagattttcaaatcccatctgacgaattccgaaatatacgatcattgcctgtacgatcataggtgtatctctgaatacctcaacataaacggtaaatattactttcatgatccgaatgagaaatttcttaataacagtgtcgccttcattgagctttatatcatttacaatacctacgatatatcccagtacaaagccaagcaatgtgccggccactgcaatatacagtgtcagccaggttcccttggcgaacatgcttgagtacttttgcgccagaaatatcatccattcaaatgaattacttggactttcaaaaatcatatctctctacctttcaaacctttattcgttagttagctgctggttgctgtgttaatacggtgttcatcagctcgtccatcttgtccttatcattccagccgatcgcattcatcgcatcctgaatctgatctctcaacctggtatcatcttttcttgttgcgatacatacgttaaccatctcatcatctcctgtaaatccatcattctcatctaactgaatgatctggagatcatcgttggtaagtgctgcggactccgcagtcggaaggtcaacgatacatacatcagcgcttccattcgagattgccataaagcactctgaagttgtctcgaagttaccggactgctcagcaccttcaatctgatcaagaagtgaaatccagccggttcctaactgtgtggtaaccttacagcctgttcctgccagatcggaaagccctttgacatcggcgtactttccacccttctttactacgatacagttatttctgtaataataaggctcggtaaatgcatacgatgcgtctctctctgccgtcttgcccatgcctgcgatgattgcatcataatcgcccgcgtccagggaaataccaatggatgaccactcaaccttatgaatctcaagctccattcccatctgatcggcaagcatctgtgcgactgctacgtcatatccgtatgcataataatcagaatcgtaaatcttgactgctttacttccatcaggtgtcgtgtcggtgtcctgcgtccagttgaatggagcgtatgcacattccataccaactcttaagaccttcttattggaatccgttgttgaagaagcctgtgatgcttccgatgctttcttatcggatgctccgcatcctgataaacttatggcaaccatcactcctgtaagtgccaatgctgcgatttttctgcttttcatattgatttcctcccttatgtcttgaagctttgtttctgattgttcttttttgtcttgccctctatccgagtgatttctctggagttcccgtatagagaataaaaaaggcgccggagaaataaaattctctagcgcctttgcttattgagtatgatatacttcgaaaagcctctttgcaatagtaatcccgtacaatttaactatgcattttgcacagttactaatgaaacatcagcctttttaccagaatgcagttgaccagatccagatattccatcgaatcatcaaggttgatttccagtatttcttcaatctttttcagacgatattgcagggaattccgatgcacatacatcatctctgccgtctttccgacattgaatccgcacatatagtaattcaccaaagtgtcaatcaggaaagaaccgtttgcattgtcatacatctccaggtttttcagcttttcattacagtaattaagaatttcctgttgattaccactgttgaacatatatttgtagattcccatagagcttgcactcagaaccttcttgttcgtcggattcggcagcatgtctttcttcgggatcagattcttcgcctcctgataacttattccgaaatccgccggcttcgtataagccgctcccaaaatacaggtactgtggattacccccgcaaaaggcgtccgactatcaagctctctaagaatctgctcaatctggggttctgtctccttattttcctttgcctcaaaaagcaacacaaatttgttcagaaaccgcatatacatcggttttttcttcatgtgaagtacctcgcgattcaggcaatccgtataataaacataggtatgctcatcctgttccagattcatgccgtacttccggtcaatcacaataacaccaacacgatacggccggtcaaacgtcagcccaaactgtgcggaaatcttctcgatatacttatcattgacctcgtacccgaataacaagttgtacagataatctccggttcgcttgttgtccacttcggtttccagaatcagttcaccgatactctgtgcgatgtcaacaaacgttgcaccctcccaccgtatatagaacaacgacagtttcaattcctttgccttctcgatcatctgctgtggaattgcttccttgtcctcctcaactgagattgcaagtcctgatattccaagctcgttcagctcgagcattgcagtgtatgcatcctcgattgaatatcgcagagaatccacgaccagaagcgcaaaattgcccggattcatatgatctttatatggctttgtctgcactatgtatgtccaggataccatgcgttccaagcccgcttcaccggtcagaagctcgactccgtctaatctcaggttgtttatatctctgcatgtaatcatcgttcgtcacctgccatttcaattataggtcattactttcactgttatgctatatcgatatcgcttttcatacagctgtcctccataacctggagatactgtacgctgtaagccggaagattcagagagccattcagcgtctgtgagatattcccagaaccgcttttcagcagatcggtgaatgttccgagcaattctccgtgatggatcgtgaaatcgctctcagacgcgttgatggcgatcagaatccgttcctgccctgtacggcgttcaaagacaagctgatggtttgtgattgagatattgcggtatcctccattgcagagggcatcactgttttgtcgaagtgtgatcagtcggtggatgaaatcagtcagtgcattcggttttggcgcctcaaagcatggacgaagcgcatagtcattgtccggagtcttgataccttcttcgccccattcgcttccataataaatacagggaattcccggcataccgaataaaataccgtaagccagaggcaggtgtgcaggggttgtcaggatgctggcaatccgtgtgacatcgtgattatccacaaaactcatcagatgctttccacggtagatacaccattgttccggtccgtactgacgattcagggagtgtgcgatctcgaacagattcatgctgttcaggctggaatagattcccttgtagcattcgtaattggtacagctgtgcagcatctcatcatttacaatcagattataatcaccgaatagtacttcaccgatcagaacaaatccaggcttttgttcttcgcaaaatgagcggagtctccgcataaagttatggtccagactgtatgccacatccaggcgaagtccgtcaatatcaaatgtttcgatccagaagcggacacagtctaataagtagtctgtgactgcaggattttgcagattcagtttgaccagttcgaaatgtccttcccatccctcataccagaatccgtcctgataacaactgtcaccgtcaaaattgatgtagaaccagtctttataaggagaatcccacttcttttcctgaacgtcctgaaatgcccagaaaccgcgtccaacgtggttgaaaactccgtccagcacgattttgatatgatgcttatgcagatcgtcacagacatcctgaaaatcttcattggttccaaggcggcagtccacctttttaaagtctctggtatcataaccgtgattgtcagattcgaaaatcggatttaagagaacagaaccgatctgcagattctccagataactgctccagtctttcaatttcagaatacgcggaacgcagatgccatcgttgtgagtcggggcaccgcagaatccaatcgggtaaatttgataaaatgtttcgttgtaagcccacataataagtacctctgctttcttatagaatatggatattatagcgtattttcgggctttcgcaaaggttggagaaggtgcgaaaaaatttttttaaaaaaattgaaatttgttgttgacaattggtatccccttatgtataatagctattgtgtcacggagaaaacgacacgaaagcgaataacggggtgtggctcagcttggctagagcgcctggtttgggaccaggaggtcgcaggttcgaatcctgtcaccccgacttcgcgggtgtagttcaatggtagaacaccagccttccaagctggatacgtgggttcgattcccatcacccgctttcttacagagtgatctgtaaggagcctataaacggggataaagtttatacgagtctgtagctcagctggatagagcaacggccttctaagccgtaggtcgagggttcgaatccccccaggctcggtatggtgggtatggtgcagttggttagcgcgccagattgtggttctggatatcatgggttcgagtcccattacccacccttttcttttataagaagcactagttaagcagtgtcatagttgagtttactaatgggctatcgccaagcggtaaggcacaggactttgactcctgcattcgctggttcgaatccagctagcccagtttacctggattagcgggtattataagaaaataagggcgtgtagctcagttggtagagcacttgacttttaatcaagttgtccggggttcgaatccccgcacgctcattgtagaacaagcagttttgcttgttttattttttccaaaattgtatatgcggatgtggcggaattggcagacgcgctggttttagggtccagtgggcatcccgtgcaggttcaagtcctgtcatccgcagtttatgaagaagccttgattttcaaggcttttttgcatgtctgggaagagttttgttaagtatttcagaactcggtttttggttacacttgattacactttctgatgacaatgcatttcagtagaaaaaagagagcgaatgccgctctctttttgtttcaatagctactttctataagcaaatttaggaacgccgtcttctgtgggaacggttacttctccctggatcagcggacgagcataccggataaaatcttctgtcacgtcagaaccatctgcagtgatccatgtaacagggacgcatttttcctgattacagatgacgttgacgtcttttaaaacataatcaatctgatagtcatctccgtccagacgttcaaaagcaaccatctttccgctggctccgtttaaagcagcttttactccgtaagctccggaagcaatggcttctttctggtctgttttggaaagcatggaagaagagcatctctggcagacattgagttctacagaacgtactttgacgccaaggcgttctttcaccagattttccagatattttccggaacctgtgagcattttgtggccgaatgtatctgttccgacatcattggaatattcgcagatgaatgtaccggtgttgtcgtggattccctcggaaatacatactaccaggtttggtgtagtctccagagacgtacggactttctcaataaaagcatcctggtcaaagtctgtttccggaaggtagatcagaaccgggttgtcgtgttcgaactttctggccagtgcgctggcagcagtgagccatccggcatggcgtcccataatctcaacaatggtaacggattttttattgtcataaacggatgcgtcgacagcaatctcccgtacagtagaagctacgtattttgcggcacttccaaatcccggtgtgtgatctgtctcgacaaggtcattatcaattgtttttggaattccgatcacacggatgtcgctgctgatcttttcggcatagcgggaaagcttgctgacagtatccatggaatcattgcctccgatgtagaagaaatatccgatgttgtatgcttcgaagcgtgcaaaaagctgtggataaaccggatcgttgagatcttcaggaagcttgtatcggcaggagccaagatatgagccgggggtggtacggatcagttccagttcttttgattcttccagtggtgccatgtccatgacctgatcatttaaaaatccttcaattccatttatcatcccataaacagtgccaatctcgtcttcgcggtttaatgcttcgtatacagtcccgtaaaggcttgcgttgataacggcagtcggtccgccagattgtcctacaactgcattctttttcatagtgttcctccaatttatcttttataaaaataagtgttctccctaatactataaaggaaggagtggtattttacaataaaatggttggaaaaataataaaagtacagtataattgctatattgaagaaaaggagtgtagacatgaaatatatatcttttgcaattccgtgctataattcagaggcatatatggaaaaagcaattcagtcgatcctgcccggaggagaagatgtggagattattgtagttaatgatggatcctcagacgggacaagcgaggttgcaaaaaaatacgaggaaaaatatccgggggtcgtcaaagcggtagacaaggaaaacggcggtcacggggatgcggtcaatacaggtctggcgcatgccacaggtgtctattttaaagtagtggacagtgatgactgggtagatgaagaggctctgctgaagatattgagtgcagtgaagggatttgtggatgcagattctaaagtagacatgttgatttctaattatgtgtatgagaaagttgggatgacgcataaaaaagtcattcattaccgcaatgtacttccgcagaatcaggtgttccgctgggatgatatcggaagcttccatctggatcagtatattctcatgcattccgtgatctaccggactgagatgttgagactctgtcagctgaagctgccgaagcacacattttatgtggataatatctatgtatattacccgcttcctcatgttcggacactatactatatggatgtggacttctatcgctattttatcggacgagaggatcagtctgtgaatgagaaagtgatgatcagccgcatcgatcagcagatttatgtaacaaaatctatgatctcgatgtatgaattacgtatggtagagagtaaaaagctcaggaaatatatgatcaattatcttgctattatgatgacagtatcttcgattttatgtattcgttcgaaggtcaatgaaaatctgatcaaaaagaaagaattgtggaaatatctgaagaagaaagattataaaacctatatgaagatccgatatggaattttgggacagactatgaaccttcctggaaaatcaggaagaaaagtgtcttctatggcatacagtgtggcgagaagactgattggattcaactaattttataaaattttaaaagcagaagcatattttgccagtcatgaaacatactacttttatgaaacgaaaaaggagtgtgtatcatgactggtaatttttttgaaagcgagacaaaggaaaatctgatgcgggcgtttgccggggagagtcaggcgagaaatcgatatacgattgcagcagaaaaagcccgtgagaaggggatgtataccattgcggacgtgtttttgtatacagcagatcaggagcgggcacatgcagagcggttttatgagctgctgaaagagtttacagggagcacgatccagattgacgggacctatccggtggatcagcaggatacattagaagagcttcttagagcagcggagcataatgaaaaggaagaatttgaagatgtgtatcctgcgtttggaagtacggcaaaggcagaaggttttttggaggtggcgtctacattcttccagattgcagaaattgagcatactcatcaggagcgatttcagaaaatcgcagaaatgctggaaaacggcacctattacagccgggaagaacaaggtcggtggatctgtacaaactgcggttatatccatgacggaaaacaggccccatctgtatgtccggtgtgccgccatgagaagggatattttcttccatatgaatacgcaccttataaaggagccgggaaatagatgagccaaaaagcagaaaatcttttgaatcttgcgttggacgctacgagtgaggagcgtgaaaaatcactggagctggaggtggggtatcagcctttggaccaggagtgggatctgatcatcaaatattcgggaaatctggaggcggttcgtgaaatcgcctcttctgttacggaattatcgaatgagtatgcaattctgactgtgccggaatcccggatagagcagttggcacagattccggagattgaatatattgagaagccgaaacggctgttttttgaagcggcgaacggaaagagagcatcctgtattctttcggtacaggcagctccgttaaagttgtacggaaaagggattcttacagcggtgattgacagtgggattgattactctcatccggattttcgaaatacagatggaagtacaaggatccgtgcactgtgggatcaaagtatagtgggaaatcctcctgaaggatattttctgggaacggaatatacgcaggaacagatcaatgcagctttgtcagagccggtaaaagccagacaggagcagatcgtaccaagccgggatatatccgggcatggcacgtctgttgcagggattgcggcaggaaacggaagaggcagtgtggggggtatttatatgggagtggcgccccaaagtgagcttttgatcgtgaagctgggaaatccgagacagggagggtttccgcgaacaacagagctgatgcagggggtggactatgtattgagaaaggcgttggaatatcggatgccggtggcgatcaatatcagttttggaaatacatacggttcccatgaaggaacttctctgttggaacgatatctggatgatatgtcgaattactggaaaagtgtgatctgtgttgggagcggaaacgagggaacatccgcagggcatacttccggcatgttaaaagagagggaagagcaaagagtagagttgggagtgcagcagagagaacctgctctgaatgtacagctctggaaatcttatgtagatgaggtggatatttcggtgatcgggccgtcaggggttcgtgtagggccaatttccgaaaggctcggaacgcagagatttcgaatcgggggaacagaaatcctgctttactatggcaaaccaagtccatatcagaccaatcaggagatttattttgattttatcccgacaggatcctatatcgacagcggagtatggcagtttgtgctgacacccagaaaggttgtgaccggtatttatcagatgtggcttccgagtcagggtgttttgaatcagggcacagcttttttaaaccctgtgagcagtgatacacttaccattccgtcaaccgcgtccagagtggtaacagtgggagcttacgatgcaagaagtttttcctatgcagatttttccggacgcggcgcactggagaagaatgcagagatgtgggtgcaaaagcccgatcttgcagcaccgggagtgcgggtaacgacagccaaggcgggaggcggttacggagaatattcaggtacctcatttgcagtgccgtttgtgacaggaagcgccgcattgttgatggaatgggggattatccgcgggaatgatccatatctgtatggggagaaggtgaaagcgtatctgagaagaggggcaagacatttgccgggatatgaaaggtggccgaataatcagctggggtatggtgtgctgtgcgtggaaagtagtctgccagattaaaacattttatttataggaaaaacatggtatggtatatacacaatgtgtatgtggagagacggaatgaatatggaaataaaagatagaataaaagaattacgcgaaagtactggaatgaatagaaaagaattctgtgagtatttcggaattccttacagaaccgtaacggaatgggaaagaggaacaagaaaaatgccagattatgtttttagattattagcatataagataaaaatggaaaattttgcaggaaaggaagaagcgaatgaagaatcggataattaatgtacaagatgtaccaatttcaatatcaaaacaagaactggatgattatatttgtattacggatattgcaaaagctaagacaggagaatcacgtagcgcagatgttgtgaaaaactggttgcgaaatagaaatacattagaatttttaggaacgtgggaaatgatttataattctgattttaaagtggtcgaattcgaccactttaaatctgaagcgggtttacatacatttgtattaagcgttgcagaatggattaataaaacaaatgctataggactatatgtaaagcgtggaaaatatggcggtacatatgcgcataaagacattgcctttgaatttgcgtctgcaatcagtccggtttttaaattgtatttgattaaagaattccagcgattgaaggaagaagaaaataatttagagcaaagtgaatggaatgctaaacgctttctgactaaaaataattatttaattcagacggatgcggtaaaaaattatttgattccaaagatgaattatagggagaacctacaatggctggcatatgcagaagaagcggatatattaaatgtggcattgtttggatttacggcaaaagcgtggagagaagctaatcctgaattagcaaaaaagaacaatgtcagagattttgcaactattaatgaattgacagtactttctaatctggaatctcataatgcgcagatgattaaagaaggaaagaaaaaagaagaacggtttaaaatcctacaggaaattgccgaatatcagctgaatgttctgaatactgcagagaagattaaaatgctggaggatgagaatcagttggtagaaatataatttaagtttcgctaagtttcactaagttctgtattcatgatgacaaacggaaggaggtgtaatgaaaatcattgccttgatttgtagcaataatgtaacgtccactactactgaacttgtagcaatgacttgacatcctcgggagtgttgtgtacagcacaaagtatctctaaaatatgaaaaatgtaaaatttttgcaactactatcagcgggaactgatatagtaagtgtagtgaattcagttgataatatagaaggaagcatgaagaaattagtggataataagatgataaataaaattgaaaaattacttcaagaggcaagaacacatgttacagttgaagatattgatttgcatgaaaatatgtaacgtatatgctagacaaggaacaactgattgggtaggtagaggcggttttatctttaaaagataaagagaagaaatggaacaatatatgaaaaactggaaaagagaaatgttttccttgaagggaggagaaaatgaagaacctgaaattggctgagctgaccaaagaagagttacagaaaatcatagaaaagatagcgaagcggctgtcgaaagagcagtatgaatatctgcagcatttaattacagaatacacagagaaacaaaatacagctgacatctcgcctcagagtctgatgtcccaaggatttgttgatgaaaaaatgttgcagattgaagaatggaagcagcagatagaggacggtaaattatatttggatacagaagaatatgaggactacggggacgattactgggatagagaatggataatagagtactatgataatcagcagattggggataagattatgtttatgatccgatttgcaaatgactgtatcaatgacaggcgttatcaggaagcaaattctatttatgagtggctgtgggaaatggaagtgggtacggattatgaagatggggaatttgtggatttggatacactggcggagaatggtattattgccacagatatgaaacagctggcattacaaaccttatatgcgaattatcaggtgttgaaaaaggaaaaaagggcagagatgctttatctgtatttcaatcattctgcttttaaaaacctgcatatggaagagatattccatgttggaagggaagcgctgaaggatcagaaacaattctgggaggattggatcgttcttctgaaaaacaaacagggtgatatcgcagggcggcttttaaaagatgcagtcttgtattctcagggaatagacggacttgtccatattgcagatgaaagtgcagcagtacacccttcgctttatcttgctgctatggatgtgtatggcaaagcacaggattatgaaaagatagaaaaaacaggggaaaaagttcttgagaaggttaacagacaattgaagatcagagcagagatatgtttgaaagcagcatatgcttcattctgtcttgggcatgaagaaaaaatgatgaagttttgctgggagtgtttctgctcagattcaacagagaaaaattttctgcgtctgtttgggacaaaggaaatggcagcgcaatatgggatgcgtggaaaagaagtgcttaaaaacagaatcaggggaaattgtgaaaatgatataaggaatacagaactgcaccggaatatcatagatggttatagttattattttcttagtttttatatgggggattttatatctgtgaaatcagcatctaaaaatccggcgggttctctgggatggagttcttcttttattcgctatggaattcggttgtttttgctctatttatatagtaaatctctgccctctaaagccgcggggagtattgcgaattatgttggattcccagatatgaaagatgctgattgtgtaatgggatttgagcaggaaataatagaagagagccagttgcataaggtaagtgtattctggaattattttcagagatggaaagcgtattacccgatcgaacaggcagaaaagaagagtattctgtcttgggcggaaaaaacggtatatagcagagcggatgcaatcgtgtcaggaaagcatcgaaatcaatacgcagaagttgcggttttgctggcaatggtaggagaaatcaaggaagatatgggaacggcgagagccagagaagaaatttttgcggagtataaaagaaaatatccaagacattcttcgtttcagaaagagatgaaatactattttgatgtaaagtgaaggtgtcggggagtttgtctggaaagatatttcatgaattagaaatggagaaatagagtaaaatgggaatgcttcaaaaaagaaaacaagggactgacatattatgaggtaatgcatggaagcaggaaaactggaagagttgaagagatatcagacaggagaaaagtagggagagaaaatatatggttgactggagaaaaattcctaaaatagatgcacatattcacttgactccaaaggatgtcatagatgctaatatagattatgacggaagatttattgtgaatggttctatagatgattatgaaaaaataatgaaaacatataatattgaatgtgcttttattatgccatttaatgatccgtatatgctttctatggaacctgcggtggaagtagtgaataagaatatgaaaaatatgcgaatgatcataaaattctcatagaactccattcttatccaagggagaaattattggatgatgtatgttctcctgccaggattagaaatgtagttggaaaatattcaaaccttagattgtcaattgctcatttgggtggattccaatatgaagaattatatggattaaatgcatactttaatttatcagcggtcttacctgatttggtggatagaatgggcatagaaaatacgaatatagttttgcgttctttagggggtgaaaagttagtattcgcaacagattatcccgatagcagaagcatacgtgcaatagaaatttacgatacatattgtgatattttgggacaaatggattttacacaagaagaagctgaaaatatttgtaaatataatgctttaagaatgtcagggttgcagtaagcagatatgaagaagggactgcctattccgacagtccccctgtttcaagtatcatcctcccgattttttctgtttcattctcttaatgactttcagtcgtgtgaattcttcccgttctttttcttccagtgcattggtgatattgtaaaccagttccgtatacattggaatggtgatattttgcagcgcatttgcccgcttctgtgtctttttaatgttagtggcaaggcgatatgctgcgttttccaccatggaaagttttaccgtcagatcttttacttttcggaatgcatctgcagccaggtctacgctctcgcgggttgtactgaaagcgtaggtcggcgcaggcacggaaggggtgtattttacgtggggaatctcggttcccataatacttctggtctgaatggtgatggagttttcaatcggaacggtataggcaatctgagagaccatgttgataccatgctcgatattggcacgctgcaggcactgatacgcataggtaaaggtgctgtcgatctcatcctggatatctcgcgcctcatcgatcagatccatcagttcccggatcagaatatttcgttttttgtccatcagctcatagccttgttttgcaagggtgagggaatttttggcaagcatgagattccctttggtaggaaatgtacgcggatccatataacccctcctttagttctgatttgcgatggagcccggactggatgtggcagtcgtggtgtcatcgtaaattgttggatgatagtatttatccagaatcttcgtatccacacgatccagctcttcttttggaagacgtcccagaagttcccatccaaggttcagggtttcttccatggtgcggttttcttccggaccctgcccgatatatttctcttcaaattcttttccgaatgccagatactgtttgtcaatcggggagagttcatcttctccgataacagaagccaggtttcttgcatcgcctactttggcgtaagcagagaataactggtttgccagatcctgatgatcctctcttgtgtatccggctccgattccgtccttcatcagacgggaaagggacggcaggatactgatcggcggatagatggactgtccgtttaaggtgcggtccagaacaatctgtccttcggtaatgtatccggtcaggtcaggaatcgggtgcgtgatatcatcgtttggcatggtcaggatcggaagctgcgtcacggagccattgacaccctgtacgataccggctctttcataaagtgcagcaagttcactgtacaaatatccagggaatccttttcggcttggaatttctcccttagaagaggaaacctcacgcatggcttcagcgaaagaagtcatatcagtcaggataaccagaatgtgcatattttgttcaaatgccagatattctgccacggtcagtgcaaccttcggcgtaatcagacgttccacgacaggatcgtttgcgaggttcagaaacatggcaacgtggtcggcaacgccgctttcttcaaaagttctgcggaagaagtcggcaacatcatgtttgacacccatggcggcaaatacaatggcaaattcttcatcggaatcatctccgagagacgcctgctttacgatctgggctgccagctggtcatgaggaagtccgtttccggagaagatcggcagcttttgaccgcggatcagggtggtcagtccgtcgattgcagaaattccggtgcggatatagtttcgcgggtattcccgcatgaccgggttgagcggcaggccgttgacatctcgtttcagcttggaaacaatgggacccagatcgtcaatgggttctccgattccgttgaatgtacgacccagcatatccggggaaagtgcgatttccatcggatgtccggtcagtcgtgtgtgtgtatttttcaaagacatgttctcagagccttcaaagacctgaatcacagctttgtcttcatatagttcgataattcgtccaatcttgcgttcggatccacctatgacaaactctacgatctcgtcaaagaaagctccctgtacgccctccagagcaatcagagggccgttaatgctgctgagtcctaaatattcgattgacatgagcgaaatccctccttatgcgttcttttccagtacatgctggtaaaatgcgtcaatgtctcggtgatactgggcaaacaattccagccggtcgttcggtacatcatatttgatggcaatgacgcggtcgaaaatattttccgatttgaggacggacatggggtgtcccatcgttaccagtgcgcgtgcctgtttgtaaagatataaaatcgtatccatcattttgaactgcttttccatggatacgcaggtatcatccttgtggaatgcgttctgctgaaggaatcccagacggatgactctggcgatttccaggatcagcttctgatcgtccggcagcacatcgcttccgatcagtttgacgatttccagaaggctgctctcctgattcagtagcgccatgaggcggtttcgatagtctacgaatttcggcgatacattgtcctgataccagggcgagaggtcgttcaaatattcactgtagctggtaagccagtggatggcagggaaatgtcttgcataggcaaggcttttgtccagtccccagaaacaacgcacgaatcgtttggtgttttgtgtgaccggctcggagaaatcaccgccctgtggagagaccgctccgatgatggtgacagatccgtcagtcccgttcaaattgtgcatcatgccggcgcgctcgtaaaatccggacaggcgggacgccagataagccgggaatccttcttcggcgggcatctcttccaggcggccggacagctcgcgcagagcttctgcccaacgggaggtggagtctgccatgatcgctacatcatatcccatatcccggtagtattctgccagtgtcagaccggtgtagatgctggcttcacgggcagcaaccggcatgttggaagtattagcgatcagtgtagtgcggtccatcagaggatttccggtctttgggtcgatcagttctccgaattcctccagaacctgtgtcatctcgtttccacgttctccgcatccgatatagataatgatatcagcgtcagaccacttggcaatctgatgctgtgtcatggtctttccggttccgaatccgccgggaatggcggcagttccgcctttggcgattgggaacatggtatcaatgatacgctgtccggtgacaagtgggattgaagccggaaaacgatggcttgtcgggcgggcagtacggattggccagcgctgtgccattggaagctgtttttgatctccgctggaaagttccagtgtgatcaaaggctcttcaattgtgtacgctccgtcctccacgatttgaatcacggttccttccagatcaggcggtaccatacatttatgcgtgatcgcgtgagtttcgggtacttctgcgaaaatatctccgccgtggagatagtctcccacagaaacggtgatgtgggcggcccattttttctctttatccagagagtcaacggaaacaccgcgggtgataaacgctcccccggattctgcgatccgctccagagggcgttcgattccgtcaaaaatgttgtttaaaattccgggcgccagtgttacagacaccggatttcccgttgcaatgacttcttcgccggggcgaagtccggttgtttcttcgtagacctgaatggtggtcatgtctttatccagtgcaatgacctcgccgaccagcttttcccgtcctacatataccatttcagacatacaaaatccggtattgcctttcaaatagatgacaggcccgttgattccataaattcttccagtcttaaacaatgctgtcacctcctgagaataagaatttgtcgtattcgttgcgcagtgcggtcttaaaagaatgatcgatcagaatattgcggctgcggatgacggcacggataccgcctgtaaagtcttccgcactgatcgtcaggtggatgccggtggcatcttccagagaagaacgcttttcctcatctgaaggattgagatagatcgtcatctcttctccgtttgcgaatacgatcgcattgtgaatacagcggagcagaaaatcatcgtattctgcggttttcatataatcatttaccagggcgtatgcctcctcaaagatcttgtcttttagttcctgctgaatgcggccctggcggcgttttaaatccagctgggcgcgcgccattgcctggtttttctgctgtctggcattaacagtttccgctttgatacgagtctgcatctgtcgttttgcttcaattttatggtcttcaaatactttttccagtgcatcacggtaagagtcgataatggcattgctctcggctcttgcttcctccatggatgtcgtgcgcagatgggtgatcttttcttctaaagtcaagaggatctcctcctttaaaaatttttgccttacaatttcagtccgatggcttcggtaatatatgaggtgataaagtcttttttgcgtcctgttccgtgccggtccgggatctcaatcagcagagggatttttctctccagacggaattcatccagaatgtccggaaattcccgtccgaatttttcggtcagaagtacaatgccgatggatttgtcctgcagaactttttctaattgttcccgcagttcctttcgttcatgtacgacgacaccgtccacacctgcaaggcgcattcccgtgtaagtatcgacattatcactgataagaaacatcttcatcttagagtttaccaaggatcatgaaggagatgatcagtccgtacagacaaacaccttccgcaagacctacgaagatcagagatttaccgagtacactggagtcttcgctgattgcgcctaaagcagcggaggctgcacttgcaacggcaataccgccgccgatacaggaaagtccggtaaccaaagcagctgcgagatagccgagtcccgtggacaaagaagaggaagcggctgcggcatcagcggcatgtacctgtggacctgcaaacatcatgatggaagtgatcacgaatgcgccaaagaagaaaaagacattcgttccgatggcacgtttgtatttttttcggttcctttccccgatcagatagtatccgaatgggatgataatgcttaagatcagtgctgcgatgagaataagttttgttgtaagtgtcataattggaatcctcctttaagaacgtttcttttttgtaatttgagttttggtatatgggtcaaaagctcttccgcttcctttatagaaacggctgaacatctcataatattccagacggagtacctgaattcctacgatcaggccttccataccgcatacgaacaagttgcctaatacgacaacgatccagttcggggagccggattctgcgccggcgagcatcagcacgacttccatcatggcagcgtggctgacggcaaatgcaccgatacggacgaaagaaagggtgttggagaagtaactcagcaaggtttcgaaaatctcgaaaaatccctgtacaaagaacattgcttttccttcttccatcttgtctgcacgcttttgaatctttttcgtcaaaggctctttgaacaggatcagcaagagcggaacgccgaacataactgcaaggacgattccggcaggtgttttatgacctgtcataaagagcacaatagtgacaacagcagatgcataaaatacaagacctgccattccgtttgcatcaaaccatgcattctccacatcatgagaacgaagtgcattgatgatgtgcagaatcatggcaaagatgatcagccccataccaaaagctacagatacgataaatacagtattgagttttccgataaacggaagtgtagtcatgtggtcaatgggtcttagccaaagcggttctataatatcttcaaatccgaaaatacttccgaacatcagtccgaagatggtagaaaatacacctgcacaggcaatgattccggccagtggttttttcttaaagtgatagaccaaaaaacctccgatcaacaggagcagtccctgccccacgtccccgaacatgactccgaaaataaaagagtatgtgatggcaacaaagatggtcgggtcgatctcgttgtgggcgggaagtccatacatgccaataaacatttcaaatggtttgaacagctttggattctgcagcttgaccggaggttctccaaagtaagtattccgatcttcttccacgacaacaaatactttatcatcgtctttgacttcttccataaagcgtgtgacatcatcttctgacatccagccacagagaatatagtaatcttctttctgatcctccatgcgggcagccattttccggacatcaaaattgtgtgcaagttcttccagccgttgttttgatgcgacgatctgtggtgctttttgagcaagcatatcagcggcttcctgattgagatcattgatcttgcgggaaacctctgtgatctgtcggttcagcttttgataggcatctgctggtgttcctgtatattcatcggggatggtgattttctcaaaatgcagagagcggaatacagcatctactttttgagcttctccgggtgaaacaaaatagacaccatagagatagctttcatcctgttctcctttgacaaaaatagctcccagattatccatcagatacttctccagacggccatattgttcaaccggaatccgtccaaaccggtagttgatgtatttgtagtgcaaaatccgatccagttctccatccagaggacggaatggttcaatcagtttttgcttgtttaaaagcgtttctgtttcttttttgagcgtttcttttttggactgaattttcaggtaagcctcattcgtggtacgaatcagctcaaaaatatcatccagaccaagagaagtatccggggtgatctcatctgcgttttccagatatcctgcaaactcttctgccttgccgagtgcatccttgtaaggattgatctccacgaacgggcggagattatccacagtttttagttctgacagagcagactcgagctggatctcatatctggacagatagaggtctgtcacccggtcgatatcatttcttggaccggatatattgatgaatttcatttttacgatcattaaatttttcctccaacatatcctaaagtctcgcccggatttaatccatagcggatacattccatggcggtcgtcagttttcgaagttcttcttcttttaagaacagatacatattgatcgaagcgatcgaataaggattctgccttcggtcggctgtatacaaatgatacaggcagtcctcatacatctgttccatggtcagttcctgtccgaaatcataatgtcttgcataagatgttttctgaaacagcgtaaaaaattcatccacatcagatgcctcaaccatcgctttgacctgttccacggatacacgatagtggatcggaatcagaagtgaatagatatcagcttctttcagatgaaaatgctttttggaacggtagatccactgcatattcagcagatcaatcttggagccgcagtctctggtgaaaagctccagttcttttttcttcagaaactttttgcgctctttccacatggcggtaaaataataaaggttcaatgcaagatcgtaatcaaacagggtgacagactgactgtcttttagttttttcagcggttcgtaatactctgtgcctttcagattttctacgagctggtccgttgttctggaggtgatcagcttttcaatggaaatctgcgagtatttatcaaagaatggttttttgtggttcagatcaaatggttcctgataatgattgattacaatacgcagacagtaattgatcaaatccacttcataccgctttaagtaaagttttaaaaactttctctgattcggtccgcagaaacggtaaatctttgtgtaatcgtggtacagcgagagaatcagcactttttcgatgttgcctctatgcagcatggtctcatccatatcctgaagtacatcctgataggaagaatttgtatttaaataggaaaccagttcggtgacacttgtaagagctgatatctcctcaaactgttcatctgtgatcagtctggcttccatggcacgcagcttggtgatgatcccactgtattccagtaagtttcccatatgttacacctctgtgattcgttttaaaatttcctgtgcataaagtgtgtgcctgctttcgtattctttcttgagtgcaagtacacaactgtcgtttgattctgcctgctgatctaagagagtctgcgtatctgcttccagagcttcccggattttttgcagatgtgcctgtgtctcttgttccagatccagatcaaactgctttcgcttttcttcatattctttatccaggacggatttttgaagttccgcatgttctgcgatcgcagatgcggcagattcgatctccgtcaatttgttaataatagactccataaaaagccccctttttagtcagaatatataatacactatcatacaccttttggctgaaaaaacaatcactttgtcgattattttaacactttttatcaaaaatcatgtgagaataatcaaaaatttaaagagctgttgaatggtaaaaaaatagatttgtacaaaattattaaaaatgaacattaaaaagcaatatattatataaaaataacaagaaaacgctagaaaaggtagtgtcaactgagttatgaaaaactgagcgataagaaaaaggctcagatgaaccttgaaaattgcagatatgttagtttgaggtaagtttacgccacccttgacagcacgcaaaagaactgctgtagataaatcaccgacggcgaagaactcaagaacagttagaacttcttccgtcgaatacagcagtgtagcagttcttttgcgtgccatcaagggcaagccgaaagcgttgctttcgatggctggatatattacctcaggctcggaatctaagaacaattagaactttcagtttgaaggtttaagatggtctgttgtcctaagaaaatgagcagttgccatttacctggcatattatcagcgccatttagcatatcagctttgttgagtacctgataatgattgtgcttgtgtgggcgcagaaaattatagtaagcaacccataaggctaaatcgtaattggcaccttcataattatcaaaaccattggtagttcggtaggaagctttgtaggtgcgattgagacgttcgatcatctgtttataaggacgaaattcttttgaaacttcgtcatcattggttaaaccgataacctgtgtgatggtaaatttaaaatcatctttaaattttttagcaaactccatggcagctagtgtgctgtttgacaaaggttttaatgaccggaagttcatcaactttgaatttttgatatttgggagaatgagaatcatcgaaagcccactgtttaagagggatatatctgcagataaaatttaaaagccagcagatttgttggtgttggtattgaataaaagaaagtaagtattgtataatgtccatgagcattggctcctttcggggatgttggtttggcgattgacattataccaaaaaagggaggtcaatgctctttttattgcagatttccctaaaaatcaaggtttttaatagatttaaacaataaaaaatgggtagtttttgacactaccctagaaaataggggggataaaatataataaaaatgataggtatactgtggaaaaatattcttttcacagggtaaatttggggcaaaacaaggaggaacactatgaagaagaaaggaaaaaaaggtctcgcagtgacagtgacactgactgcaaacgaaccggtgcagtcaatcgagggatggactctggatgaaacacagactgtattaacaaaagcacacgacaaaaacggaacttatcatgtaacggtgagatctgcaggtggtcaggagaaagaagtagaatacacggtaagcggtattgacaagaaagctccaaacatcaagattggtggaactggaaatggagaaaattatcgggaaatcaaatccattgcaatacacgatccagaaggtatttcttatctgatgatcaatgagaccaaaacagagatcaacgataagtacaaatatttcacagatatcaaggctcttggagtagtggagggtacgaatacagtcgttgttgtagataacgcgggaaatgaaacaaagattacctttggctatgacaaaacagcgccgacgttcaaatggattgtagataacaatacacaggcacagtctaaagaagttcgtctggaaacaagtgaagaaattcagctgccggatgaaggatggtcacttaagggtgaagagaatggcgtatttgtttacgggaagacattctatgcaaactggaaagataaaaactttaccgtaacagaccttgcaggaaatgtatcagagccacagtttgtagaagtaaaacggatcgataattcgagaccaacagttgtggaactgacacaggatattacagactggacaaacaaagacgtgacagtgacaattaagacatctacagattgtgtggcaccggaaggatggaaacaggttaataagagaacattcacaaaggtatttaatgcaaacggagagtacagtgtgacgctgacaagtgtgacaggagtgacaggagatgctcatctattcagtatcaccaatattgacaaagaagcaccggttattgattatgcagctatcgagtcagcaaacggatacagaaaagagatcccggtcaatgagggtgaagagtataccgaagaaaagttggtcgagatgttcacaaaaccagagtgggtaagtgacaattccgggacagcaacatttaaggttgacaaatggggattggaacacggtctggatggatatcagccatttacatccaagacacctggcgaatataaagttcgtttctatgcatacgatgcagccggaaacaacagcagttttgatgtttatgtgaaagtattagagccggaagtaccggaagtagaagaacgcacgacaacagtaagttatacggtatttattgacggccgtgttcgtaccggacagtggacacatacaggaactgagacgggagaatttagatttgatctgtctatggtaaaaaatctgccggcaagctatgaactggaagagggagaagaaggatatcggatgctgcagtatggtgatacgactgctgtaactttctatcttacaacaaaataaaaagcagaatttttgaggttctgtaaatagttttaaatccgcctgagcaaacgagggaaaataaaatctccgtctggtcaggcggaaattttgtatagaaaaaaatgtttataagaattttattttggtatattctggttttctgctataatataatggtccgttgaaaggacatttgattcaggggatacagaagggagtataagagatgagattacgtaatattccgcgtgcggaagggacaatacagagccatcaggcagcaatcaagcgtccggaagatcagaaaggatgctggaagcaggtgtttggaaatgagaatccgatctacatagagataggcatgggaaaaggtcgttttctgttaaatatggcaaagcaatatccgaatgtcaattttatcgggattgagagatattccagtgtattattgcgtgcactggaaaagtatgacacagaagagtttcaggaactgacaaatatccggtttgtttgcatggatgcaaaagaactttcggaagtgtttgcaaaaggagaagtggagcggatttatttgaatttttccgatccatggccgaaggcacgacatgcaaagagaagactgacttccacagaattttttgcccgttatgacaagatccttgcggaagacgggacagtggagtttaagacggataacacagagctgtttaatttttcgctggagcagatcagagaatatggatggacagtactcagctatacatacgacttgcatcatcatgaagagatgaataaaaacaatatcatgacagaatatgaagaaaagttttctgcaaaaggcaatccgatcaataaattgattgcaggaagagggaaggaataaattacacacttgtgtcaaggccgcatataataggagtgagggagactcacaacgggagcgtggcggatgggatggaagagaagctggaaagaaaaaatgcgtcagaagatgtattgtcaggcagaattgaaccgacggattttatgcatcaaacgttcattagaagaagtatatgcaatactcaatacaggatattgtcataagaaataaaaggaaaaagtaggtgtttgagatgaagatcagagtaactgcgaaaaactatccacaggaagtactgaggtctgagacaccggttctggtagaattctttgccgtatggtgcggaaaatgtgcgatgatggaagatatcgtggatgaaattgcagaagagtatgatggacgtgcgaaagtctgccagattgaaattgaggaatcagcagttttagcagcggaatatgaagtaaatgtggttccgacatttgtagtatttcgtgaggggaagccggtgaattatgccagtggggtacttggaaaagaagttttgacagagatgctggaagggtgaaagaactgacgcgatgagaaagcaaatgtatataaaaatgcttgtatataaaagcgagttgctgtataatataagtaaggaaaagggaaaggagtgaatgatatggcacagattagtttacgtgtggatgatgaattgaaacgtggcgctgaaaaaactttaaatgatattggcttgagtatgtcaacagcaattaatatttttctgaaaacagtagtgagagaaaacaggattccatttgaattatcagctgatccattttacagtaaggaaaatatgaaagaactagagagacgtgtccatgctgtccgctctggagaaagcaccttgaaagagcatgagttaattgaggaagattgatgagaaagctttgggaagatgaagcgtggaaggaatatcttgagtggcagatgaaagacaaaaaggttctcaagaggattaatcagttgctgacagatattgacagaaatggatatcaatgtatagggaagccagaaccattaagtgggaatctttcaggttactggagtgtccgcattgatggaaaaaataggattgtttttagaattgctgacaacaatatagaaattatacaatgtggtacacattatagagagaaatagggcgggatttgatgctgataataagcatgatagcctggagagtttcaaaaagctgcagaaattagaagaaaaagtctttttccgcagctttttgacgaaaagtttgaaatcctttatcgatgttatgaagatgtgggcggtaaaatataaaaggtgaattgaagaaatttgagaaattgaaggaaatttacaaaaaattaaaaaagtacttgctttttgaaaagaaatcatatataataattcttgcgttacggattaggtaacaacataaagatgcgcgattagctcagttggtagagcacctgactcttaatcagggtgtccagggttcgaacccctgatcgcgcacttagaaatcactgtttttgcagaccagaagctgcgggggcggtggtttttttgtgcgtaaaattgtatgagagtaagcatggtttttgagcggttagtcgatatgattagctgcttttttattataaaagtaaacatatatctttggactaaccgcttatcggtagtacctttttctatttttattctatcagagataaagtaagctgtcaaattccttttgctccagaatggtccataataatttgtgctatgcatctgttttctcccaattactagaatcatgtgtatcatcaggatacagaatgaaaagaaagttgtttttcgtgaaatgttggaaaaacggacaaaattgcagaaagatatattggaaaaacggacaaaaagggattttctataaatagaactcttgaaaggtacgtatttgcaggggagacggcttacacccaatgtcatttagttaagatattgagtcggcagcctcttgcagagcaaggtatataaaaatatataccctgctctttttttgtaaaaaatccttgacaaatatagaaaaatttgcggcgaagccacttaaatgtattacattttggaggtaacgcttatgatatttgcggaacatgtaaaaaacaaattgtcatctttaatccatgaaatggcgaccgccccatggttgttttcaaaaaatccagaagttgatttttcacggaacagaaaacttgattttgtatctacaattcaatttcttctttctatggaaagtggaagcttaaaaaaagaattgctggattatttccagttctctgtcgatcccccgtctgcttcagcgttctgtcaacagagaaacaaactacttctggaggcattccagtttttgttttatgaatttaattcttgtttctcattcgaaaagaagtataaggattatcaactattagcttgtgatggctcagatttgaacattgcccgtaatccaaacgatacaggcacttattttcagtctcaaccaactgatcggggatttaatcagattcatctgaatgctcttttcgacctgtgcgagaagcgatatattgatcttgtgatacaacctgcaaggctagaaaacgaatcattggcaatgacacaaatgattgaccgttataaaggagagaaaaaaacaatttttatcgcagacagaggatatgaaacatataatatttttgcgcatgtccaagaaaaaggaatgtattatctgattcgtgtaaaggatggcggtgggggaagcatgacaggaagttttgaccttcctgatgaaaatgagtttgaccacgacatgcaacttatattaacccgaaaacagacaaaagatgtgaaagctaaacccaaaaaatttaaatttattgcaaaatccagtccatttgactatctggatttatatgacaaaaaattttatacgttgaattttagagtagtaaggtttgccatttcagaagattcgtatgaaagtataattaccaatcttccaaaggaagattttccagtagaagaaataaagaaggtttatgcaatgcgatggggcatcgaaacatcgttcagggaattgaaatatgctatcggattatgttgctttcattcaaaaaaggtggagtatatcatgcaagaaatatacgcacgtttaatcctttacaattattgtgagctcattacaatgcatgtaataatccaacaaaaaggtacaaaacatgtttatcaaatgaattacacaatagcaattcatatatgtcgttatttcctgcgaaatgacatttccccacctgacgttgagacgctgatacagaagaatcttttacctgtaagacccgggcgttcagaccctcgcaaagtcaagcctaagtcagcagtaagttttctgtatcgagttgcataacatcgataaaagtatatcgttaatttaggcagatagcaatctgtctttttgtgctgcataaatataagagcaagtttttataaaagaaaaatcaggcaaagatagtgaattttctgcctctgcctgataggaatacatctgcttaatgtcttaactaaatgacattggcttacaccgtccccctcttcacaagcatagtagacacctctgtctttgtcggaggctgtccgggtgtatttaaaagatcgatgagtttttgcgcagcagcttctcccatatactgtttcgggacatggatggttgtcagtgcgggctcaacgacgctaccaagagggaggttgtcgaatccgacgataccgatatcctgcgggatccgatatccgctttcttttaaggctttcatggcgcctactgcaatcagatcgttgtctgcaaaatagcaggaagccagttcttcttcatttttgatgatctccagcatatcggcatatgcgccctccatggaaggcgtcaggctgtggacaatggaacgggaagaggacatgccggaggcgcggatcgccttgtaaaacccggaagaacgctcggcgaaattgctgatcggataggcagagcgaagatatccgggctgtgttttgcaggttcggatcagatgtctggctgcaagatacgccccctgtacattgttgatcagaacgcagttgcagggaacagtttcaaaataggcgtccagaaggacaacagggatcggaagatttaaaaacggttttaaatctccagcttccatttctgttccgagcaggataattcctgcgcagtccgaatattggatttcttcgatctgttttgtgatcgtatcttcatcttcataaatataactgatcttcagacgatagtcattctttttgcatccctgtgaaattccctcggaaacctgggagaaaaacggagtgtctgccacaacggttccatgttttttataaatgacaaaataaatcgccccggaagtggtatgcttttccgcgatccgggaaaaatcatatccatatttttcggcagcatccaggacgagctgccgtgttgccgtactgactccgggtttgtgattgagcgccatggagacagcggcggcagaaagatttaattttctggcaagttcttttgctgtgattcccatatatgatcctttcgaaaaacctgtttgatgttctgaatttattatgaaccaggtgtaaagaaaaaacaagaattaagtaaataattaagtaaaaaacacttaattatcggatgaaattgagtttctccaaggctatactgaagttagaaaacaacgagaaaagttgagagtaacacgaaaatacacaaacaaaaacagagatgtgaaaggagacaaaatcatgaaaaaaatcaagctgggatttgcaccgacaaggagaagtattttcagcgcaccggatgcggttaagtacaggggcctgactgccaaaagactggaagagctgggcgtggattttgtggatattacggacatcaatgaagaaggacttctgtatgatgacaaagatgttgataaaatcgcagaaaaattcaaaaaagaaggtgtggatggactgatgctgccgcactgcaactttggaacagagtatgtctgcgcgagacttgcgaaaaaactggatgtgccggttcttctgtgggggccattggatgaaagaccggagccaaacggtgtgagactgcgcgacacacagtgcggactgtttgcaacaggaaaggtgctcagaagatttcagattccatttacatatctgacaaactgcagattaaacgatccggtctttgaacgtggagtcaaagattttcttgcagtatgtaatgtcgtaaaaacatttaaaaatatccggattcttcagatttcaacacgtccgtttgacttctggaccacaatgtgcaacgaaggagaattgctcgaaaaatttaatattcagctggcgccggttccgatgacagagttgacagaagaagtaaaaacagttcgtgaagacaaagaaaaaatggagcagatgatcgcttacatcaaggataccatggttatcaagatcaaagaagaggaagtagaaatggtagcagccctggctctggcaatgaagagtctggtagagaaatatggatgtcaggcagctgcgatccagtgctggaatgcgcttcagacagaaattggaattatgccatgtgcagcaaatgcgattctcaatgagcagggcattccggtagtctgtgaaaccgatattcacggagcagtgaccgcacttctggtagaagctgcgggaatggatgaaaagagaggatttttcgcagactggacgatccgtcatcctgacattgaaaacggagaactgctgcagcactgcggaccatggccgatgtcggttgcacaggaaaaaccggaactgacgtatccgctggcattcgagcatccgggaagtctgactgcagaagcaaaacacggagaagtgacactgtgccgcttcgatggagacaatggagaatattcacttcttcttggaaacgcaaaaggtgtggacggaccgaaaggaatgggaacatatctctgggtagaagtggaaaacatcaaacgtctggaagccaagattgtagaaggaccgtatattcaccactgtgtcggtattcacaaaaatgtagttccggtactgtatgaggcatgtaaatatatcggcgtgaaaccggatctctatgatccgatcgaggaagacgtaaaagcatatctgcgcggtgagtgagagaaaggaaggtaagatatgaatttaaaagcattggcttatcagcttagaagagacaccatagacattatctgtgccggaaaggcagggcatatcggcggtgacatgagcgtgatggaagttctggtagagctgtattttgatcagatgaacattgacgcaaaaaatccagaagatccggacagagatctgtttgtactcagtaagggtcattctatggaggcatactatgcagtgctttcggaaaaaggatttctggacaaagaagatgtcctgaaaaatttcagcaaatttggttctaaatatattggccatccgaataataaactgccgggtatcgagatgaattccggttctctgggacatggacttccggtctgcgtaggaatggcaaaggcagccaaaatggatcacaaagaccgccgcgtgtatgtagtcatgggagatggagagctggcggaagggtctgtctgggaaggcgccatggcagcacatcagtatcagttggataatctgtgcgcagtggtagaccgtaatcgtcttcagatttccggaaacacagaagatgtgatgggacacgatgatttgcatgaacgtttcagaagctttggatggcatgtgatcgatgtaaaagacggaaatgatatcgatgaactgcacgctgcattcgaagaggcaaagcgtgtgaaggggaaaccaacggtactgatcgccaatacggtgaaaggaaaaggttcttctattatggaaaataaagcaaactggcatcataaagttccgacacaggaagagtacgatatcatcatgaaagacttaaaaactgcagaggaggcgttgtcataatgggaaaaacagcaaataaacaaatgatctgtgaagtattgatggaagctgcaaaagaagataaagatattgttgcgctctgcagtgattccagaggaagtggatcttttacaccatttgcagatacgtatccggagcaattcgtggaaaccgggattgcagaacagaatctggtcagtattgcagccggacttgcaaaatgtggaaagaaatcttatgcggtttcaccggcatgcttcctttctacaagaagctatgagcagtgtaaagtggatgttgcatattccaacacgaatgtaaaactgatcggaatcagtggtggagtcagctacggtgctctggggatgagtcatcattccgcgcaggatattgcggcaatgagtgcgattccgaatatgcgcgtttatattccaagtgatcacctgcagacaagagaactgacaaaagcgttgttaaaagatgaaaaaccggcgtacatccgtgtgggaagaaatgcagtagatccgacttacgaggaagataatgtaccatttgaaatggatcatgcgacagttgtgacagaaggaaatacaaatggaaatgatgtagcgatcatcacctgcggagaaatggtaaaaccagccaaagatgcagccaggcttttaaaagcagaaggaatttcagcgtccgttctggatatgtactgcatcaaaccactggatgaggaagcaatcgtgcgcatggcaggaaatgcaaaagcagtccttaccgtagaagaacatgcaccatttggaggacttggttctatggtggcacaggtgacaggaagagaatgcccgaaaaaagtagtaaatatgtctcttccggatgcatcggttatcacaggaacttcaaaagaagtgtttgattattacggtctgaatgcagaaggtattgcgaacaaggcaaaaaaaatcctgaaataggggacaggagagaggacatggcagagagctatattatcagtattgatcagagtacgcagggaacaaaagcgctgctttttgatcaggacggcatgctgtttcagagaaaagatctcccgcataagcagatcatcaatgaaaaaggatgggtttctcatgatccggaagaaatttaccagaataccgtacaggtggtgaaaaatctggtagaggcgtccggaatttcaaaggagagcgtcaaaggaatcggaatcagcaatcagagagaaacttctcttgtctgggaaaaagagaccggaaaagcaatcgcgcacgctgttgtctggcaatgtgcaagggccgctgaaatctgccgccgtgtggagaaaacaggggcggcagagatgatccggaaaaagacagggcttgcgctttcgccgtattttccggcttcgaaactggcatggctgaaagaaaatgtagaaggtgcagaagcgctggcaaagaaacatgcgctgtgtttcggaacaatcgatacctggcttgtataccggatgacacatggaacgtcttataaaacggattactccaacgcatcccgcacccagttgtttgatatttttgagcagagatgggatgaagaaatctgtcagttatttggactggatgcacaggatctggcagaagtatgtgattcggacagctgtttcggagagacagatctggatggattttttgaaaaaccagttccgatccacagtgtactgggagattcccatggagcattgtttgggcaggggtgtctggaaaaaggaatgatcaagtccacgtatggaaccggatcatctattatgatgaatatcggggagacaccggtgctgagcacgcacggtgtagtaacttctcttgcatggggaatgcaggggaaaatcaactatgtgctggaaggaaatatcaactacacgggagcagtcattacatggctcaaggatgatatggaactgattcagtcgccggcagagacggaagaactctgcagaaaggcagaagcagacgacagtctgtattttgttccggcatttacaggacttggagctccgtactggaacagtgaagcgaagggcgctttaatcggcattacaagaacgacaagaaaggcggaaatggtgtgcgcaggagtagaatgtatcgcataccagattgcagatgtggtaaatgcgatgagtcaggatgcaaaaaccgagattcaggagctgcgagtggacggtggtccgaccagaaatcagtatctgatgcagttccagagcgatatcctgaatcgaaaggtgcttgtgccggatgcagaagagctctccgggattggagctgcttatgcagccggaagaggactggggctgtatggagatgaagtgtttacgcgtctgaaacgtcaggaatatgcgccgaagatgtgtgaagaaataagagtgcgaaagtacaatggatggaaagacgctgtaaaaagcgtattaaagtaaatgcttgcgaacttcagaaggtgtgtatgcagtaaatcgtaataaatatgggaaattcggatttcattgacgtattgaagaaacgaaattcccatatttttttgaagaatcggcagaagtgctctttgaaaaagtcaatatcgacttaaaataagttaaaaaggctctagtatctttggaaaatacaccatataatatacttgtaaagagaaaaagagataaaaaaggattaggtgaggaatatgaacaatacagtagtattgaaagacagagcatatgtcgagaagaagcagagtaagaaaacatggatggacagagtgaaaaaatattttcaggaaaacagagaaacgatcatagcaggacttctctctatgaatggtgatgtaaatgcgtatcgcatgttggagtggaaagataaataatggaatatacagttggcaaataatgctccggggtcgagagagacttacggagttttttaatggttttatttagtgtctgctgattaagcagctatctgtaacttccaactcttatatctgttccggtcataccagaatcggaacagatgcaaaagagcacaaagtattcgcctctgaatcctgaacagattcgtcacgaatacagataatgcgatagatgtcaactgcgtttcttccagttttgtggtaatgcagctcataccataacagcgtttgctcaggctgaaggtgcgctccacttcgattctatcggtattatcctgatactcttgttttttatcaacttttgctgtggcgcttggtctgcccagctttggacctgataaccggatcccatgctccttgcaataactcctgttttccctggtccggtatatctgatctgccaggacacgttctggataataaccggtacgctctttgaagcgttctattgcttcaatcaggcaggtgctctcgttgtatgcctcgaaagatattttttcgaggcgcccataaccttcgctgtcaagactgagatcaaattttgcgccaaattcaacaggtgctttgaccttccctctgacaatcggccgaagccatggctgcgaaatgcttacaatgcgatgctccacagaatggattctgttatcgtacatatactgttgctgttcatacagcctgatgatggtaagatataggccgatatccttacctgtcatggcgtatccatcactcatgaactgttccagatagccaagatctcttttcacgtagccaagctgtctgcggagtgcgctgcggattttctttgccgtgtgctttctgctcttggcaaatgcaagatactcttttctggcacgtttgcggtatcttcttggcaacttaagaccataacatttacaaaaacagtaaatcatgttttccagcttttctcttgcttcgttcaaaagcgagatgtcctgcggataacgtatgtttgcaggtgcgcaggttgcatcaagtgtcagagtccctttgtttgtatcttcttttgcagtaccatcatcaccggattttcctacggatggaggagtatggtcatctttgtcatcctccttgtgagcaagaagatactcatttacttccatcagcatatctgctgaaatgcgtttacggaaaagaaccagtgtacttgcatcaaacggagcttcttcccgaaaaccgggaagcccgataaagtattgcagatacggattctcagcgatctgttccacaagctcacggtcggaaaattggaacttggtctggatgatcagggctcctaatgccatgcgaagaggcctggcaacattacccgtatcacttggaaacagcttggcatattttacttcgaattcatcccatgggattcggtcagccagtctgacccagcggttatccggattcatgtggagtcccataggttggttgaaatcgaggaatgaatgctgtaacttgtcgatcggtttgtacattgttttagcccctttatacttaaaatctgtaagaaaactgcaagaaaaacgatttgtttttgtcaaaatccttgcaatcattataccagaaaatggggcaaaagtcagtaaaatcaagtgttttcagtttgctcagcagacactatttagggataaaggaattgtttttcattggctgatgtcgtataatagcacaaaatgtagtaatctgaaggggtggagtgtatggaaaaggatatgaccgttgggaatccaacgaagatgatactgaattttacgattcctctttttataggaaatgtatttcagcaattgtataatatggcagatacaatcatcgtcggaaaatttgtaggggcaaatgcgttggcggcagtagggtctacaggaacgatcatgtttttgatcattggttttctgcaggggatgactgccggatttacagtgcctactgcacagaaattcggagccggagatatgagatccgttagaaaaacagtaggttcagctgcgatcctgtcgctcatcgtgtcagcgatcatgactgtgatcagcatggtgggaatgagatggttgcttcattttatgaatacgccggataatatttttgacgatgcttatcggtatattatggtgatctgtgcagggatttttgcgcaggtgttatataatctgctggcaagtattctgcgtgcgctgggaaacagcaagacaccgctttattttctgatcctggctgcggttttgaatattattctggatctggtatttattattgtgttccatatgggagcggcaggcgcggcttatgcaactgtgatcgcacagggcatctcaggagtgttatgtctggtttatatcatcagaaaggttccgattttaagacttacaaaagaagactggaaattggatggaacattggtgaagatccagtttggaattggatttccgatggcgtttcaatattccatcacggcgatcggcgcgatgatgatgcagtcttctctgaatatcctaggttccgtggcgattgcaggatttacggcagccagcaagatcgagcagctggtaacacaggcgtatgtggcgctgggaacgacgatggcaacttattgtgcccagaatatgggggcaggaaagattctcaggatccgacagggatttaaaagcgcgacatggatgggctttgcatatgccgttgtgacggggatatttgtgatgtttgcaggcaaatatctgacgccattatttctgtcagaaaatctggggcagatcatgggatatgtggatatttatctgaaatgtgtcggactgttttttattccgcttactgtggtgaatgtgtatcgaaatggaatccagggcatgggatttggaattcttccaatgatggccggggtggcagaactgatcggaagaggtgtagttgccatcggggcggcacactataaaagttatgtgggagtatgtctggcaagtcctgcggcatgggtgctggcaggcgggctgctgcttgtgatgtattttcatatcatgaagaggtacacggaggatttgagcggccagaagtagaaagaattacgaaagaggaaaaagatgcgcggcaaaagagaaagaaccaaaacagtaaagtatatatggagcggacttttatttctggcggtcagtggcattttgacactgatcgcaagaatcagtctgtcattttcggaatggtattctacttatatttacaaaggcctggtgtctgtgatcgggcggttgtttgggaaagttccattttcgtttgtggagctgagtctttatgttgtgatttttttgatgattggaactggaatccatgcagctttcgagtccaggaaggcaggaagaaaagcaatttggcaatggcttgcgggattgtttttgggcggctgtatcatgctgtttgtatttgtgatcaactgcggcatcaattatcatagagaatctttttcggaaaaatccgggctcaaaatacagacgtattcggtgaaagacttgcaagcaacctgtcaatggctgacagaagaggtcaatcgtctgagtacacaggtagagagaactgaaaacggagagctgcagctgccggaggagatacgacaagaagcagtccggtccatgcaggcacttggcaggcagtatcctgcgcttcagggatattatccgaatcccaagccggtgctggtttcagaaatcctgtcatatcagaaactgatgggaatttatgcgccatttacgatcgaggcaaattataatcaggatatgccgtcatatgattttccgtttaccatgtgtcatgaattgtctcacttacgaggatttatgcaggaggaagaagccaattttatttcatttctggcatgcagggagtcagacatgacagaatttcagtacagtggaacgctgtctgcgtgggagtacgccatgaatgctctatacagggcagatccaaaagtgtggcaggaagtaagagaaggtctgagcaaagcggcagaaccggatttgcgggcagacgatcagttttggtcagaatatgatgggagcgtggcagaagtggcgaatatggtgaatgacacgtatctgaaagcaaatggacaaaagcagggtgtcaaaagttacgggaaaatgacggatctgttggttgcttatgatcagagtctttgaaaagagtgaaaaagtgatttgaaaacggaatattttgggtttaggaacatagaatagaagtgtagaaaaagtaaaagaaaaaaagattaaaaaaattttcaaaaaacacttgcaattctaatggagctatgataatatataactcggtcatcactgaagcagtgatacagacaaggctccatggtcaagcggttaagacatcgccctttcacggcggtaacacgggttcgattcccgttggagtcattagtcttcggactaacaacaaaataaggcgcagtagccaagtggtaaggcgtgggtctgcaacaccctgattcaccggttcaaatccggtctgcgcctcttgggaaacctcagaaacttatgtttctgaggttttttgttgtgtcacagtaaaaataccccctggagtggtagtaggaaatcaaagcaaaccagcaagcgtatcacaaaaacccagtatgatcccaatgcagaagtagattatctggacagccagatgaaacgtattccatttattgcgcaaatgaaagcattggattttgaaagatataaagtacaataccggcaggacggaagattagaggcaggaatgccggtgatagatggacgggatcaggaggctttgcctggaaattctgaaaccgttatgcagatagattataagtttcttcaggatggattgtttcttccggatgacagcggataaacctaacagcagaaaccaaagctaccttaaaaataaattttacaaacttttaaagcaaacttgatcataaccagaaattgtttatgctaaacttgctcaggaaaaaacgattggaattttattccgtcagactcatgacaggaggatttgagcaatgaagtttaaactaaagccaatagagaaaaaatggattctttatgatatcgggaattcagcatttgcgcttctgatctctacgatcataccgatttattttaattatctggcgggtgatgccggaatttcagaagtgaattatctggcgtactggggatatgcaacctcagcggcaaccgtaatcgtagctgtgttggggccgctccttggaacggtctctgatgtagcgggaagaaaaaagaaaatcttcatgatcgcactgttagcgggagcatttggctgtgtatttcttggatttatgcagtcctggatttggtttttgttgttgtttgtatttgcaaaatcagcgtattctttaagtcttgtgatctacgattcgatgcttaccgatattacatcggaagaacggatggatgaagtctctgcgcagggatatgcctgggggtatatcggaagctgtgttccgtttatttgcagtctgttgctggtattgttttatgataaagtgggaatttcgatgcagacagcgatggggatttcgttttttctggtagcggtctggtggattgcactgacggttccgcttctgaaatcataccgtcagacacacagtcggaaaccgacagtacacgcaggacagtccggtgtgcaaagattgggacagatcgtttctgaattaagaaaagacaaaaaagtgctgttttttctggcagcatttttcttctatattgatggggtatatacgatcattgacatggcaactgcatatggtactgctttggggctggataccacaggtcttttgcttgcactccttttgacacaaattgttgcgtttccggcggctctgttgtttggaaagatttccagaaaagtaagtgcatcgagactgattctggtatgtatttctgcgtattttctgatcgctctgtatgggatcggacttcacaggcagtatcagttctggatcctggcagtctgtgtgggatgttttcagggagcagttcagtccatgtcccgttcctactatgcgaagatcattccggcagaaaaatccggagaatacttcggaatttatgatatttgcggaaaaggagcttcttttatgggaaccattctggtgtctgcagtgagccagattacaggcagtgtaaatctgggagtaggagcgctttctgtgatgtttctggcaggctttttcttgtttttgaaagcggacaaaacagaaaaaagcgaggaagaacaagaaaatccaggcgtactttttcagcagcctggattgggtcagtgatctatgcaaaaaatgcttttgcagctttgagcagatattcggtatccttgactccggcagtttcatatggagaatgcattgccagttgaggaagtccgatatctacggtattaagtgcgacctgcgtgttggaaatattgcccagtgtggagccgcctgccatgtcggaacggttggtaaatgtctgatacggaacgtctacctgcttgcagatatccttgaacatagcggcagaaatgccgtctgtgcagtatttctggttggcgttatatttgatgacgattccttcatttaaatacgggcggttgacaggatccgctttatctgtatggtttggatgaactgcatgggcattgtccgcagagatcataaaactcttggacagtgcgataaagtaatcctgtgtatccatgccgaataccgtacagatacggaacagcgtatctctaaggaacgtagatgcagcaccctgttttgttgtacttccgacttcttcgttatccagaacgcagtgaacggaaaccgcctgtttgcggtctgcgccaagcagtccgtaaagagaagcacaggcacactggagatcatccagacgtgtagcagagagaaattcctcgtttgctccccagagagttcccttctgacgattgtagaggaagaggtcgtgactcaaaatttcctctttttcgacaccggcatactttgaaatcgtatctaagaacgtatcttttgcagaaatatccccgtataatggaagcaagtctttctgtgcattataagcgtatccgctgttggcatcccggttcatatgaatggcaagattcgggatcagaaggagatcccggtctgcgttgatcagtttcgcacagtaggtaccgttttcttttacgatcacccgtccggcaacagaaagcggacgatcaaaccatggggcacagagcataccgccatagcgttctacgtttaatttgatgtaatgatcctctacggccatctccggattttctttgatcttaaaggaaggcgaatcactgtggcttgcaatgatacggaatccattttgaagaactacagattccggaatggagaacgcaatgatagaagatccgtttcttgtaacaaaataatcattaccaggtgttaaattccatgtctgatcttctgacagctctgtaaatccatgttttgtcagaatctctttcgtagtctgcactgcatgaaagcagctgggactgttctctataaattccagtaaatctgttgtaattttatttgacatattttgtttcctcctacattcataactaatgtctattttagcacgaggctgcggcgttgaaaagagccggtgattctgttaccataaggaataggtaaaacgattttcagagaaagaagaaggtgagaacaatgcggattttagtagcagaagatgaaaaagacctgaaccgtctgctgagcaccagattgaaagcagagcattacagtgtggactcctgttttgacggacaggaggcgttagattatctggaaggggcgccatatgatgcggtggtccttgatattatgatgccggttctggacggtctgagtgtcttaaagacgatgagacaaaaggggagtcagactccggtcttgcttttgacggcgaaggacagtgtggaggatcgtgtccgcgggctggatgcgggagcgaatgattatctggtgaaaccgttcgcgtttgaagaacttttagcgcgcatccgggtgcttctgcgcaaaccaaaggaggcgccgcagacagtctgcaaactggatgatctggaagtacatctggatacccatcaggtgctgcgtgcagggcatgagatcaagctttccggaaaggagtttgcgctgctgcgctatctaatccagaatacgggaattgtgctctccagagaccgtctggagcagcatttgtggaattatgattatgcaggcagctcgaatgtaattgatgtatatatccgttatctgcgtaagaagattgacgaagggtcacagacgaagctgatccatactgtgcggggtgccggatatgttatgagggcggaaccatgaaacgattttctttgaaattaaaattgacagcgatgtattccttttttatggtactggtgacctgtctctgccttgcagtccttttttctctgagcggaaatgaaatcctgacgtctgcacagatgcacttaagagaacgtgtgcaggaaagtgcagatgaaatcgagctggaagacggggaattcgaaattgattcggatttttattcactggataacaatgtatatctggcgctttatgatacaggtggaaacttcttatatggaaaggttccgccgggactggaacaggctccgcaattcgaggatggaaagattcagacggtgaaaagtggaacagagcagtggtatgtgtatgatgtgcagtatgaaatggaaaatggtcaggaattctatatccggggtgtagtttctgttacagagacacagaaggagtttttgatcgcagtccgatttgcggtgattttactgcctttgactgtgattttaacggcgctgatcgggtatcgtttgatcaggcgaacgcttcttccggtacggcagatgacagagaccgtacaggagattcaaaaagacggagatttaagccgcaggatcggagtcagtcaggataccgggaaagacgaattttatcagctggcaggaacatttgacggtatgctggaaagtctggaacaggcgtttctcagggaacggcagtttacatcggacgtttcccatgagctgcgaacaccggtcagtgtgattctggcacagtgcgaggcatctctgaatcgcacagatttgtcagaagagcagaggaaagaaattcttctgatccggaaaaaagcaggagaaatgtctcagatgatctctcagcttctgttattgtcacgggcagatcaggggcggcagcagttaaataaagaagagatcaatattagtgaattgacagaaataattgtggaagaacaaaagatgctggcgcagaggcgtaaaattgaggttcatacagagatagaaccagacatcacaggctatctggatgaatccttttatatccgtatgttggataatctgatttcgaatgcagtttcttacggaaaagaaggtgggaatattaaagtgacacttcatcagattccgtcaggggtacagggaacggtagaagatgacggaatcggaatcagcagagatgatcaggtgcatatatgggagcggttttaccgggtggatgcctcacggactggaaaggaagaaggttcgcactccggccttggactttccatggtaaaatggatcgcacaggcacatggagggaatgtccgggtggagagtgagctcggaaaaggcagctgctttacatttgagttaaaattctaatcttattttaatcttcatggaatatattattcttacaaacaaagaataacagtgtagaaatgcagttgatagaaagagaggaattaaaatatgatgaagaaaagatattttgcagcggcagcagtatgtgtgatggcaatgagtatgtttacaggatgtgcaggaaatgatggaaaggatatcggaaaagatgcagcgaaaacagcagcattttcagatgcaggtgtaacagaagacgaaatcacaaggctgaaagtaagcaaggatcacgatgacggaagaagcgtttatgaggttgattttacagttgcatccacaggggaagaatatgattatgagatttcagcagaagatggcagcatacttcaggttgacaaagagatggacaagggaagtgtgagtacgacacagaatcaggatcagaacgcttctgaaaattccacacagcagggaagcagtaacacagcaaatcagacagaggcggcaatttcagaggaagaagcaacaaaccttgcgttggaaagagtgccgggggcatctgcacaggatttgagaattcagttggagtttgacgatggagttcagaaatacgaaggcgacattatttatgacggaaaagaatatgattttgaaattgacgccaacaccggaacatttctggaatggagtgaagaacgggttggataagggaaaggataaaaagaaatgacaggattaagtacactatgttatatcgaaaaagacggaaaatatctgatgctgcatcgcacagtaaaaaagaatgatgtcaataaagataaatggatcggtgtgggtggacattttgaggcagacgaaagtccggaggaatgtctgttgcgggaagtgaaagaggagacaggatacactctgacttcctggaaatatcgtgcgatcgtgacatttgtgtcaggtgacggtgtgacagagtatatgtccttatttacagcagatggatttacaggagaacagattgcctgtgacgagggagaacttaggtgggtagataaaaaagaaattgaccgactcaatctctgggaaggggataaaatattcttccgactcctggaggaatcggaagaattcttttctctgaaactgatctatgatggaaacggaaagctattgaaagcgatgctgaatggaaaaccgatgaattagatcaggtagcaatacatgacaataaagtggcaggcacttccggccataacaaaaagatgaaaaatctcgtggcttccgaaattcttatgtttactattgaagatcggaagctttaatgcgtagataataccgccgatcgtgtagatgattccccctgctaaaagccagccaaatgccgccggcgataatgagtggaaaatctgtgtgaaagccagtacgcaggtccatcccattccgatatagagaatggaagatacccatttcgggcaatagacccagaaggccttgatcagaattcctacaatagcgatcccccaaacaatggaaagcagaatcagtccggtacgtcctttcaaagtgatcagacagattggagtatagcttccggcaataaggataaagatcatcatatgatcgatctttttcaatatcgtatttacttttgcagaaatatcaaatgtatggtaggtcgtgctggcagcatacagcaggatcaggctgatcgcatatacggcaagggaaatgagagataccttgcccggttcatgggctgcctttatcaacagaggaatcgcgccgcagattgccataagcataccaataaaatgtgtgatcgcgctgccggggtcttttaaatgttgtgttttgttcattgatatcttcctccttaaaacttgaaaatcacatgtagtttttaaaactacattaagtatatgtgtatattacaccttgtattccttgaatgcaagtgattttaaaaaatttttataatcaaagaaattttgacagaaaaagaaaattctgatatgataattcagattgtattgtgggactgttatacagtcccctatttttgttttgagaaaaggagatttatggaagaattaaaatttgaagagttagagttgtgtcctgaaatattaaaagcagtaaaacatatgggatttgaagaggcatcaccgattcagtccaaagcaattcctgtgatcatgagcggaaaagatgtgatcggacaggcgcagacaggaaccggaaaaacagcagcctttggaatcccgcttctggaaaagattgatccgaagaataaaaaacttcaggcgattgttctttgtccgacaagagagctggcaatccaggttgcagaagaaatcagaaatcttgcaaaatatatgcatgggataaaagttctgccaatctatggaggacaggagattgtaaaacagatccgttctctgaaaagcggcacacagcttgtgatcggaacaccgggacgtgtgatggatcatatgcgccgcaaaactatgaaaatggatcatgtgcatacgattgtgctggatgaggcggatgagatgctcaacatgggattccgtgaggatattgagacaattttggaaggaattccacaggaacaccagacagtacttttttctgcgacaatgccaaaggcaatcttagagatcacaaaacagttccagacaaatgcggaactggtgaaggtgacgaagaaagagctcaccgttccgaacattgaacagttttactatgaagtgaaaccgaagaataaagaggaagtgctttcccgtcttctggatatttatacaccgaaactctccgttgtattttgtaatacgaagaaacaggtagatctgcttgtgaatggactgctaggaagaggatattttgcggcaggacttcatggagacatgaagcaggcacagagagaccgtgtgatgcagggattccgttctggaaagacagatattcttgtgtgtacagatgtagcagcaagaggaatcgatgtggatgatgtggaagcggtatttaattatgatcttccgcaggatgatgaatattatgtgcaccgtatcggaagaaccggacgtgccggacgcgtgggacgttcgttctcttttgtttccggaagagaagtctataagctgaaggagatccagcggtactgcaagacgaagatctatgcgcagaaggttccgtctttgaacgatgttgccaacacaaagatggaaaatgtgctggaagagatcgaacagatcatcgaaaatgaagatctgacaaaattccttcagatcattgaagaacgtgtcaatgaatccgattatactgcaatggatctggcagcagcatttttgaaatactgttccggacagcaggagacagaagaaaaagatatggaatttggtgataccggggcagaagaagccggaatggttcgtctatttattaatatcggtaagaaaaacaaagcaaaaccgggagatatcgtgggcgcaattgccggtgaaagtggaattccgggaaaactgatcggaacgatcgatatgtttgataagtatacatttgtagaagttccgagagaatatgcacgagatgtactcaatgcaatgaatcatacgaaaatcaaaggaaaatctgttgcggtagagccggcaaatcagaaataatcaaactggactggttaaaaatacaataactggacattttcatctatccactctggtggtaggataagaccatcaaaaatgaaaagagggaaaacgatggaaaagagaaagcagacagtagtaaaactggcacagacagcacttttggcggcactttgctttgtatcatttacatttttgcagattaagatcccgatgccgggtggagatgccacatcccttcatatcgggaatgcattttgtgttctgggagcattgctcttaggcggttggtacggcggactggccggcgcaatcgggatgacgatcgcagatgttctggatccgatttatatcgtaggagcaccaaagacatttgtgttgaagctctgtattggtctgatcgtaggacttgtggcacatcgtatcgggaaaattaatgaaagtacagataagaaatatgtattccgctggagtgtccttgcatccgttgcaggactgggatttaacgtgatcgcggatccattggtaggatatttctacaagcagtatattttaggacagccgcagcagatggcagaagtacttgcaaaatggagtacagcaaccacatttgtgaatgcagtggtatctacgattctggtggcagttctgtataatgcactgcgtccggtgttgttaaaaagcgggatgctgcagattgtaagaaaagcagaagaagtcaaaatttgaaatagagaaatgtgaaaaccacaggagaatctcaatcaacatgattcgcctgtggtttattttacttaagcatgaatcgtagttccggtcttacccttgagtgcatcattgatcttgtcataagatgtgatcagagcggtacgtccttctctttcttctacaaattcaacggcagcctggaatttcgggagcatgttgtagactccgaaatgtccctgctccatatattcttttgcctgtgcagctgagatttctcccagtttttcttcgttgtcttttccgagattgatacatacctgctctacacttgtcaggatgatcagctgatcggcatcgacaccttctgcaagttttccggcagtcaggtccttttcaatgactgcgcttgcaccttttaagtgattgtcctgttccagtacaggaattccgcctccaccggcagcgattacgacctgatcagcatccagaagtgcgttgactgcatccagttccacgatcttcacaggatgcggagcggaaacgactcgtcggaatccttttccggcttcttcaatcacataatttccttttttacgctcttcgttggcttcttctgcgctcatgtaacgtccgagaactttggttggtgtatagaaagcctcgtcataaggatctacgatcacctgtgtcaatacagtgctgactgtacggtagattccgcggttcatcagttcttcccggattccgttctggagatcgtatccgatatagccctggctcatggcagaacatacagacatcggtgcagctgtataattttcatggcgctgtccgaattcattcatggcagtgtggatcatccctacctgtggagcattgctgtgtgtgatcgcaacctgaaatccggcttcaattaaatttgcgattacttttgatgtattttttactgcgactttctgctccggcaatgtagttccaagagcacggtgtcccagtgcaacgacaactcttttcttcatagtcatatccctttcgttaaataattgtgatgagtaaattatattatttttcgtacaaaaaagcaacgttattccacgcagaagttgtggattatcgataaaaggcaaagaagacatccagcaacatcagcattcccagcagaacacatacgcaaagcaggaaccagagggggatttttctggtaatctgcttccattttggtgcgatgaagtactggcaggcgcatccgatcagtccaaggaacatggcatccgcaaaaaacggaggcagcagagaaggacaaaagtattgagaaattttgtgcaggtctgcgtgccagatcatctggactgtaaaatctgaaaggtatccaatcacagagtataacaacccgttcatacagaatgccagaatcggattttttgcaaaacggtgcagcatcgttacgctgagaacaccgcagattccataaagaggaatccatggaccaagcagaatactacggttcaaaaagaccccttccattgtgagatagctcagtgtttccagaatccatccaagaatggaaaacagaaagaacagcgatgccagtgtcagcgggtgataggaagcggtcggagccataggctgatgtacagcacggaccggcggctgaacagaaaacagaaaggccggatactgatgtggctcaaaataggcaatctttgtataaggtccttcagaatcgtcataaagcgctttgcggatcagtagctcgtcatcagaaagctcctgttccagaagtggatcattaaacagctcgtaacggggagcgcgggaccggatataattttttcgcagggtcatatataattcggcatcggtggctgtctgataaggattgacaaacagaaaatccagaataccgaatgtaaggagagaaagaatgctccatccgataaaagacagatgcagaagaaacatccgccatttgtttccgcgcatcagctgtctggataaaaagaatgcatcctttcgtcccattgtcgggttctcagccagtatataaggaatcatgctatattcgtactttttgatgatgccgccgatgaacgtcaggttccagaaagtctgaaaaacacaacggcaggtcatgatccatgcagggtgggaaaagaagttcactttgtaaagaaagaaaagcttaccgatcgttgtcttttggtaagtgcgcgcctccagaaagaaacgggcttctccgataagcagcacgttttgaatgaagacagtatagagaaaagacagcaatacccccaggagaagcagaaaaaacgaggtggaaaacggatcatgaaaggcctcgttgactgcctttaaagcggcaaagagaaaagatcttccactggtatatatattgagcatgtgttcgaacagacttgccagcggtgagtcggaaagtgaaatctggaatacgtggtgtagcgtgtctgctgcgatcgacgaattggagacatccggaaaattcagatgtgtctgaacaaaaattgtttgcagtcccgggcgaaactgccggaaaatagaagtggaagatgcaaatgaggtcgttaaaaatgcgatcagaaaacagacagataccattttctgatagttgctctttagtgatttttttgcctgatgtttcagatgttttcttgtccacataacaggattcctccgattctgatgatagacctattatagttgcttcacggcagactgtcaaagaagatttgcaccttgtcaacagaacctgaaatctgctaaaatttagattgctgtgaacagtaaccatagaacaaggaggatgaaaagttgagaaaattgattccttatttgaaaaactataaaaaggaaagtattatcggaccgctgtttaaacttttagaggcggtatttgaattgattgtgccattagtcactgcaagaattattgatatcggaattcagaaccaggatattccgtatatctggaagatggcggcattgctggtggcgtttggtgtaatgggacttttgtgttccctgctggcacagtatttcgcggcaaaagcagctgtcggtttcggaacagaacttcggcatgatctgttctgccacatagaacagctttcttatgctgcagtggataaggctggcagcgccacgctggttgtcaggatcacaagtgatatcaatcaggtacagtccggcgtcaatctggtgcttcgtctgtttctgcgatcgccgtttattgtggtaggcgcaatggttatggcatttacgatcaatgtaaagatcgcattgatctttgtcgtgacagttccgcttctggcgcttgtgatctacggtattatgatcgtgacgatccctctgtataaaaaagtgcagaaagcactggatcaggtgcttgtctctaccagagaaaatctggcgggaatccgtgtgatccgtgcgttttgtacacagaagaaagagcaggaagagtttgatacaaagagtgagatactgatgaagctgcagtttctgaccgggcggatttcggcgctgctgaatccgatgacatatattatcgtcaacgccgggattattgcggttgtctggtatgggggcggacaggtatatgaagggctgctgacacagggagaggtgatcgccctggtcaattatatgtcccagattcttctggcgctggtggcgctggcgaatctgattgtttcctttacaaaagcagtagcatctgcagcccgtctgaatgaggtatttgcactccgatccgagcttgtggatggagagtgtgagaaagcagaggcgaaagcgggagccgtgaaagtaaagatggaacacgtgacattttgctatccgggcagtcaggagccggcgctggaggatatttcttttactgcgaaagcaggagagacgatcggtatcatcgggggaactggttccggcaagacaactctggtcaatctcattccccggttttatgatgtgacagaggggaaagccgagatcgatggactggagatttcgaaataccggacagagactcttcgaaaacagattggagtggttccgcagaaggcggtgctgttttccggtaccataaagagtaatcttcaaatgggaaatgagcaggcatccgaacaggagatgtatgcagcattaaaaaccgcacaggctttggagtttgtggaggagaagccgggaaggctgaatgctcctgtcagtgaaggcggaaaaaacctgtcgggagggcagagacagaggctgacgatcgcaagagcactggtgaaaaatcctcagatactgattctggatgacagtgcatctgcgcttgatttcgctacagatgcggcacttcgaaaagcattatcccaggatacggaaaatatgaccgtatttctggtatcgcaaagggcttcttctgtcatgcatgccgataagatcctggtgttggatgacggaaagatggcaggatacggcaatcatgaagagctgcttggagagtgcggtgtctatcaggaaatctgtcggtctcagttttcgaaagaggaggtggctcagtatgcataaaaagaaaaaaagtgtatggaaaaagatactctggctgattcgtccctatctgcattttttgatgttgtcattcgtatttgcggttatttccgcgttgctgacattgtatgctccgattctgatcggtaatgctgtggatctaattcttggaaaaggaagtgtggattttgatgcgatcggcaggatcctgttcaggctggcagggattattgttataaccagcgctgcgcagtggctgatgaatctgtgcaacaaccacattacgtatcgggtagttaaggatgtccgtacaaaggcatttgcaaagctgcaaaagcttcctctgaaatatgtagacagccatgcatatggagagaccatcagtcggatcatcaccgatgtggagcagttttcggacgggcttctcatgggatttacgcagttctttaccggagtggtgacgattttggggactttggtctttatgctgctgatcaatgtgaagattgcgttggttgtgatcctgatcacaccggtatctttgtttgtggcaagctttattgcgaagaggacctatgtgttttttaaagcacagtcagagacaagagcacagatgacatcccttgttgatgaaatggtggggaatcagaaagttgtgcaggcatttggatacggtgaccgggcagtggagaggtttgatacgatcaacaaaaagctccagaaagtcagcctgcaggcgattttcttttcgtccattacgaatccgagtacccggtttgtcaacggactggtgtatacaggggtcagtattgcaggtgcgtttactgcaatcggaggcgggatcacggtggggcagctgtcttgctttttaagttatgcaaaccagtatacaaagccgtttaacgaaatctcaagtgtggtcacagagcttcagaatgcactggcgtgcgcacggcgggtatttgactttattgaggaacaaccggaagagccggatgcggcatcggcggtcgaactgaaaaatccagacggcagtatgacactggaacatgtcagtttttcttataatccggagattaagcttttgcaggatctgaacctgaaggtaaagccggaccagaaaattgcgattgtaggaccgacgggatgtggaaagacgacgctgatcaatcttctgatgcgtttttatgacattcaaagtggagagatccgtgtcagcaataccggaatccagaatattacaagagacagtttgcgggccaactttggaatggttctgcaggagacctggctgaaagcaggaacgatcgcagaaaatattgcgtatggaaaagaggatgccacaaggggagaaattattacagcggcaaaggctgctcatgcacatggatttatccggagaatggagcagggatacgatacggagatccaggaagagggcggcaacctgtcacaggggcagaagcagcttttgtgtattgctcgagtcatgttgagaattccggatatgttgattctggatgaggcaacctcttcgatcgatacccgtacagaaatgaagattcaggaagcgttccagagtatgatgaagggacgcaccagctttattgtggcacatcggctttctactattcgggaggcagatgtgatccttgtgatgaaggatggaaatattattgaacagggcagccatgaggagttgttagaaaaaggcggattttataaaaatctgtatgaaagccagtttgcgtcttagaaaaaagcccggggagatcatgcatttccccgggcggtcatatattcatgctcgcgttttaattctgcaagacagtcttttgcgagccagtgctgattggtcggtgtgaggatcgctttgtacggaaatgatcccgcaccgctttttttcaaagcaagaagcgcctgatccagcttctggctggaaagtccgcagaatacgatcattgtatcggagagttcttctccgtcataagtttcttcagaaggtgtcatgtccggcaggcctgcaagcacgccgagaggctggctgtaatctttgagtgcaatgtggcggatgcgcacacgaagcggaagcagtgcacgttccactttcttttttacttctttgtctgatatatggaataataaaatgctttctctcatacagatgaaatctcctatctctctttttgtatttattgtaatagattttatcttgtaaggaaagggcagattataaaaaatctattgacggatgcagggaaaagaaatataatggctgtattaagaaaataatacaataatacgacaggtgtacagcacaccaggcacagccgggaggaaaagtatgattgagattaagaatctgacaaagacgtataagttgaataaaaagcagatgaaagagtccagaaccacaaatccgatcaagacggcagtcaatgatcttacgctgactgcgagaaaaggcgagatttatggccttctgggacctaatggagcagggaagacgactacgctgcgctgtatttccacgatcatcaggccgacaaagggtgagatctatgtggatggacatgaggtgcgcaaagagccggagaaagtgcgggaaaagatcggatttctgaccggagatatcaagctggatccacagttttccccggattatatgtttgactttttcgggaagatccatggagtgaagccggagaggctcaaagaacgaaaagaggaactgtttacttattttgggatcaaggattttgcgcacaaaaagatgaaagagctgtcaaccggaatggggcagaaggctgcaatcgcagtcagcctggtacatgatccggatattgttatttttgatgaaccgacaaacggtctggatgtcgtgacggcaaggagtgtgacagactatctgaagcgcctgaaagaggagggaaagctggtcattatttctacacatatcatgtcagaggcagagaagctgtgtgaccggatcggagtgatcattgacggaagaaaagtgatggaagggcatctggaggatatcttaagagagacacagacagaagatctggaggatgcgttttttgaattgtacagtcaggtaaaaggaggcggggaagatgcgtgagattcgattgatctgtaaaaaagaattatccagagtgctgacagacagaaagatgttattttccatatttcttctgccggcgatcatcatggtggtcgtaatgaatgtaatgaccagtttttcggaaaatttggagaatgatgtcaaatctcatgctcccatcgtttatctgcagagtgccccggagggtgtggagcagtacttgaaggcgtataatgagaagatggatctgcgcacgatggatgacgaacagaaagtgacagaggaaatccgagatggatcagccgatttgtggattgcttttccacaggattttctggagcagatagaagtttataagatcggggatgagattccccagattaaagtttattacaatccgtccgaagagtattcacaggctgcctatgaaggcgtggcaggcggatgtctggaggtttaccgacaggcactgttgtcagagcgtgtcggagatatgcagtctttgacagtatttacagtgaattcagacaatccggacatggtgatccaggatgaacagaaagccggtggaaaagcgctgggtatgatgcttccgtattttgtgacgatcttgctttttgcgggggcaatgggactcggaaccgatatggtggcaggagaaaaagagcgcggtaccatggcaagtatgctggtagcgccgattaaaagaagctcgatcgtactcggaaaagtatttgcactgatgattatttcaggaatcagttcggttgtatatgttgcggttatggtaggcttcctgccacagatgatgggggcctatggaagtgaaggtctgggactgagtctggaagtcgggcaggtgctgatgatggcatttttgctgatcgcgatcgcatttctgtattccggaatcatcgttctgatttctgtctttgcaaaagatacaaaagaggcaagcagctatattatgccggtttatatgctgatcctgattttggggatcgcgacaatgtttacgacgcagaatattgaaaactggtattatgcagtaccggtgtttaatacagcgctggcgttacagggaattcttacaggagatgtgagtgtgatgcagtatacggtgacactggcagagacattgatcctgggaatgatactgattacggtaatcgcaaaagcatttgaaagtgaaaaggtaatggcaaaatagagattgtttcagacagagcatttcacaaagagaaggtgcctgcatatagtaacagtaagaaggctgttgctgtatgcaggcgctttttatagcggcagaacggatttcgggaagcgggtgtgaggtgtgaggctctgtgaactgagagagaaagaagtaatcaatatatgtaactgcagaagacttggctgtgtggtggatgtggatattgatgtctgcgatggaaaggttctggcgatcatcattccggttcccgggaagatctgcgggatacttggcagtgacggagaatatgtgattccgttcggttgtattaaaaaaatcgggccggatatcattttggtggaaatctgtgaagaaaagtttttgcaaaagtactagatgttggttataatggggaaaagaaaccaaatgcaaaggaaaaagaaaggcggaaacaagtatgaaatgtccgtattgtggtcatccggatacgcgggtgatcgattccagaccggcggaagacaacaacgccatccgaagaagaagatcctgcgatgaatgcgggaaacgatttacaacctatgaaaaggtagagacgattcccttgatcgtgatcaaaaaagacaataacagagagcagtatgacagatccaagattgaagccggagttttgcgggcatgctataagcgtccggtttcagcacagcagatccagcagacgatcgatgatatcgagctccagatatttaaaagagaggacaaagagatcccaagtaaattgatcggggagatcgtgatggaccgtctcaaagatctggatccggtcgcatatgtccgttttgcatctgtatacagagagtttaaggatgtcaatacatttatgtccgaactgaagaagatcctggagtagccgtatgcgaacctataaattgacgatcgcttatgatggaagccggtatcagggctggcagagacagagcaatacagacaagacggtccaggggcttttagaacaggcagcatctgagactgccggatatccgttggaggtacagggatccggccgtaccgatggaggtgtccatgcgaaggggcagacggccagtgtgatcctgcgcggaaaagtacaggagtctgagttttcacaaaatatgaaccggctgcttcctttggatatccgggtgaccgaaatggaactggtaaagaacgggtttcacgcgagactcagtgcagttggaaaatgttatgaatactggatcgatatgcgggaaaaaccagatgtgtttatgcgaaagtatacctatcattatccgaaagagctgaatatagaggcgatgcaaagagcagcggatgatctgattggacggtatgattttgccgcatttacggacaaaaaagaggaaaagtccacaattcgcacaatttatgctataatcgtggaggtacagggggacaagttgaggatcgaataccggggcagcggttttatgtatcatatggtgaggatcctgacaggaactctgttggaagtaggagacggaagaaggacgccggaatcggtgaaggctgcactggcaggcagagatagggcagatgccggatttcttgcacctgcaagagggctgacattaaaagaagtgtattattagattgggggcgggtacgaaagtagacggtccctttttgggtttttctaaagaaaacaggaggatttatgaagctgatatcatggaatgtaaatggaatccgtgcctgcgtacagaaagggtttctggaattctttcgggaagcagatgcagatattttctgtttgcaggagacaaaactgcaggcaggtcagatcgagctggatctggaaggatatgagcagtactggaattatgccgtgaaaaaaggatattccggaacggctgtatttacaaaaaagaaaccattgaatatgacttatggaatcggaatcgaggagcacgatcaggaaggtcgtgtcatcacactggaatttgaagaattttattttgtgactgtgtacacgccgaattctcagaacgagcttgccaggctggattaccgcatgaagtgggaatctgattttctggcgtatttgaagaaactggaagagaaaaagcctgtgattttttgtggtgatctgaacgtggcacacaaagaaattgacttgaaaaatccgaagacgaaccggaaaaacgccggatttacggatgaagaaagaggaaaattcaccgagatgttagatgcgggatttattgatacattccggtatttctatccggatcaggaagggatttattcctggtggtcttatcggttcagtgccagagcaaagaatgcagggtggcggatcgattatttttgtgtttcagaatgtttgaaagaccggcttgcggatgcaaagatcctgacagatgtcatgggatctgaccattgtccgatcgagctggatttaaaataaaaaggagagaatgaacatgacaaagattgatattatttccggatttttaggagctggaaaaacaacatttattaaaaagatgctcaaagaagcattttcgggagagcaggttgtgcttatcgagaacgaattcggagagatcgggattgacggaggatttcttaaggaagcgggaattgaaatccgggagatgaattccggatgtatctgttgttcgttagtcggagactttggaaaatccttaaaagaagtggtagatacgtatcatccggatcggattctgatcgagccatccggtgttggaaaactttccgacgtgatcaaagcagtgcaggatgtgcaggatgagatcgaagcagagctgaacagttttacaacagttgtagacgtgacaaaatgcagattatataagaagaatttcggagaatttttcagcaatcaaattgaatatgcaggtgcgatcatcttaagccgtacagataaggcgaaaccggagaaagtggaagaaagtgttgagctgcttcgtgagttaaatgaaaaggctccgatcatcacaactccgatcgagcagttgtcaggagagaagattctggagacaatggagcacagcaaatctctggaagaagagctgctcctggaagaggaaatctgcccggaatgcggacatgtgcatgatcacgcacatcatcaccattgccatgaagaacacgatcatcatgagcatcaccatcatcatggagaggagtgtggctgcggacatggccatcaccatgagcaccatcacgagcatgaacatcatcatgatggggagtgcggttgtggctgcggacacgatcatgaccatgatcatcatcaccaccatcatgcagatgaagtgtttacaagctggggacgagagacgatcaaaacctacagcagagaagatatcagcaggatcttaaagacgctggaagaggatgggacatatggaactgttcttcgtgcaaaaggaatggtggcaggtgcagacggagagtggatttattttgatatggttccgcaggagcatgaagtcagaagcggggcagcagaatatacgggaagaatctgtgtgatcggttccgggctggaagaagacaagctggaagaattatttggactgaaaaaatagaaactacagacaggagagagaacaatgaatgaaccggatgtaatggtttatctgatgactggatttttagacagtggaaaatcccagtttttaaagttcacgctgacgcaggattattttcagattgatggaacaacgcttctgattctctgcgaggaaggtgaggaagagtttgatccgttggaaatggcaaagcatggtgtgaagatcatcaaaatagaagaccaggaagagttgacagaagcatttttaaatgagctgaacgaaaaatattcgccggagcgtgtggtgattgaatacaacgggatgtggaaagtcagtgactttgaagcgttaaatcttcctgaaggatgggagatcgaacagaagctgacaacagtggatgccagtacattccagatgtatctgaacaacctgaagccgttgtttgtcgaaatggtacgcggggcggaactggtgctgtttaatcgttgtacagatattgaacctctggcaggataccgcagaagtgtgaaagtagtcagcccgcaggcagaagtgatttttgaggatgaaaagggtgaaatcgagaatattttcggggatgatgtgccgtatgatctgaacgcgcctgtgattgagattccaagagaggattatggaatctggtatgtggacgtcatggaaaatccggacagatacaagggaaaagtgattgaatttaccgcaaaagtattaaagccgaaaggatttccttccaaggtatttcttccgggacggatggcgatgacctgttgtgcggatgacactacatttttaggatatatctgcaagagcgcctacgcaccgaagctgcaggcaggagaatgggtgaaagtgcgcgcaaaagtgcagtatggacatgtatcagtgtataaaggtaccggaccgattctggaggcagagcatattgaagaagcagagccgatcgaagagctggtttactttaactaaaaagagtgagggagagacaagatggaaaaaaattttgacgtaatcgcaatgggagaacttttgattgattttacaatgaacggacagagtgaacagggaaataacctgttcgaagcctgcccgggcggagcaccgtgtaatgtgctggcaatgctgaacaagcttggtaaaaagactgcatttctgggaaaagtaggagatgatcagtttggaagactgctgcgggatacgatcagcagtgcagggattgatgcatcgaatcttctgacggatgatgaagtgaacacgacgcttgcatttgtacatactttcccggatggagaccgagaattttctttctatagaaatccgggggcagatatgatgcttcgtgaggaggaagttgaggaagactttatccgtcaggcaagactgttccatttcggaactctgtccatgacacatgaagaagtcagaaaggcaacaaaaaaagcgcttaaggcagcgaaggacaatggacttttagtatcctttgatccgaatctgcgcccgccgctgtggagttctctggatctggcgaaagaacagatggagtacggattccagtactgtgatattctgaaaatttctgataatgagattcagtttgtatcagggaaagaagattacgatgagggaatccggtatcttcaggagaaatatcagattccgttgattcttctgacaatggggaaagacggaagccgtgcgtactacaagggaatgcgtgtagaaagagccggaaaatcagtgaaggcgatcgaaacgacaggagccggagatacattctgcggaagctctttaaattatattctggagcatgattttgaaaatctgacggaagaacagctgggagaaatgctcacatttgccaatgcagcagcagcgctgatcacaaccagaaaaggagcgatccgttccatgccggagaaggaagaggttctggaatttctgcaaaaataaaaaactgctttctttttcccgataaatagtgtacaatgaagcgcagtacatgaagatatgggaggaatatacaatgccggaagcagtagcagaagaattgtgtgtgaagtttagaaacatcgatgaaatacagggatttgcaaaagcagtgaatcagtttgatggagatgttgatctgaaacaggggagaattacgattgatgcgaagtctcttctgggaatctgcagtatgaatatagaggaagagatggaactgcaggtgtttaatggggatgcagaagaattgaaagaattgatcaagaaatttcttgtttaaagtatgtatacatcgataacataagggtattttccagtggatgggagataccctttttcgaaaaagaaaggagagagcaggatgaaatttacaaaaatgcaggggttgggcaatgattatgtctatgtgaatggttttgaagaacggattgaaaatccttctgaaatggctgtaaaagtgagcaaccggaattttggagtcggttcggatggattgattctgatcaatccgtccgagaaagcagattttgagatggagatgtataatgcagacggttccaggggagagatgtgtggaaacggaattcgttgtgtggcaaaatatgtctatgattatgggcttaccgataagacacatatttctgtggagacactgggcgggattaaatatctggatctgactgtagaggatggaaaagtggttctggtaagagtggacatgggaagtccgatcctgacaccggcgcagattccggtcatcgcagatgaggcggaagcggttgctgttccgatccttgtggatgaaacagaataccagatgacttgtgtttctatgggaaatcctcatgcagtcatatttatggatgatatcgaacatctggagattgagaagatcggaccgaaattcgagcatcatgaacgatttccgaacagagtgaatacagaattcgtgaaagtcttagacagacacacggcaagtatgcgtgtctgggagcggggatccggggagacacttgcctgtggaaccggagcctgtgcagtggcagtggcatgtattctcggaggatatacagaaaacaaagtgacggttaagctgctcggaggagatctgctgatcgaatgggatcgtgaacagaataaaatctatatgacaggaccggcagaggttgtttttgacggagtgtggaaggcataatagaaaaagaggcagggcgttcgttacggtttatctccggttactatcaatacctgagatgaacggtaacgaactttgcttaaaaaataaaaaaagtgcttgactttttgaaaaattgcgatataatgtaaatgttgagtctgacagaaaaagaaatgatgcggattggtgtaatggcagcacagcagactctgactctgttagtagaggttcgagtcctctatccgtagcttgtaagacagtcataaaggctgtcttatttttatgtccggagtatgttactgtgtacagttgcagagagatttttactgttgtttttggagaaaaaaacattgacaatcagggacaaaaagaatataataaagcagtatgacataaggagaaacagcttacaccaaagccccggagtatgctgatttcatatagaagagttaaagtaaataatctatgataattagtaaacaggaggaacacccatgaaaacttatatggctaacccagacaagatcgaaagaaaatggtatgtggttgatgctgaaggatgtacattaggacgtctgtcttcagagattgctaaagtgttaagaggaaaaaataaaccagagtacacaccacacgttgatacaggagattacgtaattgttgtaaacgctgataaagtgaaagtaacaggaaagaaattacagcagaaaatctactacaatcactctgattatgtaggtggaatgagagagacaacactggctgagatgcttgcaaagaaaccagaaaaagttgttgaacttgctgtaaaaggaatgcttccaaaaggacctttgggaagagcaatgatcaagaaacttcatgtatacgctggagcagagcacaacaatcaggctcagaaaccagaagtactgacattttaaggaaaggttgaaaggaggacattacattggctaacgcaaaatattacggaacaggaagaagaaaaaaatctgttgcaagagtatatcttgtaccgggaacaggaaagatcacaattaataaaagagatatcgatgagtatcttggactggaaacattaaaagttgttgttcgtcagccactcgttgctacaggaacaacagataaatttgatgtaatcgtaaacgtacatggtggtggatacacaggacaggctggagcaatccgtcacggaatttcaagagcacttcttgaagctgatgctgattacagaccagtattaaagagcgctggatacctgacacgtgatccacgtatgaaagaacgtaagaaatacggtctcaaagcagctcgtagagcaccacagttctctaaacgttaatctcggttacgcaagagataatcaaaagagaatatcgaaatgcttacaaaccctggaaactccttatgtttccggggtttttcatttctccggaaacattgtggaatgtcgtgaaacggggtgaaatttgctccgtttgtaacgcatttgcaacacgtttgcaacaaagttattccgctaatgttttgtttatggcatcaacaagtatctgtacatccagatgcgtataaaccttttcagtcaggctcatagctccggagtgccctacaatttttttgatagtagtgtcctgaactcctgcctcggataacatggatatgcacgtatgtctggtacaatgaggcgtccggttaattccaatctgctctgtaagcggtgtccagtagctgtcataataattgcggtatttaaaaggcttgccatcctctgtatgcagaagatattcacagtccgggcaggattcataccagcctttatagaacggaagaagtttgtccgcaatcggaacctttctgatgccattctctgttttactttcaatcacatcaaagtattgcttatccagatacacgttttccttttttaaggaaagaaactcggaaatacgtgtaccgttgtagagaagcataaggatgatctgataatatttatcatctttcatcgtccagatcttggcaatttcatcttttgtaaatttattcctgctgtgcttattcggatttctgtccttgtactgaacgatatcaacgaaagaagaataatctttgttgcagatgtcattttttaaagcaaaatcatataactgactaaacagtatctttattttcttaagtgtaggataatttttcccgcaggtgtcgatgacctgttgaaggtctgccagtttcaggtctttaaagactctggaataaagaatggtgcaggctttgtatgatgctgaatacccttttacgttgctttctgatacggtcggatatttctttttagaccattcttcatatacttccgaaaaagtcatttttgcggctctggtatcatacggattatgattgtaatctgccagcatctgcagaccttctgttttggttgcggtgaattttaaaaaaaattacgaggttatcatatgagagagcctatacaaaagagatttactggaagcagagaaacagaattgtgctttgaaaatgaaaaataattcagtataattatggcaaggaggtaggcacatggatgaaacacactgaagactgccaactcttcttttcttacagttttaactgatgcgggtaatgttattattccaaaagatgaggttgaaggctggggagaagagtttggtaaccaccttataggtacaggacctttcactatggattcatttgaaattgatcaacagacagttcttaagaaaaatactgattactggatggaagaaccgaatattgacactttgatttttaaagttattacggactctacacaggcagccaatgctctccagacaggggagattgatatagccatggatttgaagggcgaatctgttcaggtcgtggaagagaatgcagatttgacgcttctttcgaagcctggctggctacttatctgggagcaaaagtggtgcagattcaaaatgggaagattcggattgtacaggggaacatggaattagaagtccgcttgctggaaagtataaagtgttccctgaaagctccgatggcaggaaatatggaaagaaccattcgggaaggagtagcctgcagagccttgtatcgtttttataaaaacggaagtcctgtttttgattttgaaacagacaaagcatcttttgaatatgaatatccataagttgcccgaccaatctgatttgggacaatgaaacgtatgataaaaagtcttgacaaataatgtttgttctcatattatataggtaaccgatatatagattgcctatataaggagggtgaagtttatggctattgaaaaatcattagtttccggaagtatgacgatgcttattttgaaactgctgtctgaaaaggacatgtatggctatgagatgatagatacattacgccggaaatctcagaacgtgtttgaattgaaggccggaacactgtatccactgcttcacagtcttgaagagaaaggattgttggtggtatacgagcaggaagccggaggaaagaccagaaagtattatagtctgacaaaacagggcagaacgcttctggaaaagaaaacggaagaatggaaagagtattctgcagcagtatcgagtgttcttgcattggaggtgtaatggatggatgaatatttaaagacattgctggaacagattcgctgtaagaaggcacgaccttatatccgacaggaattgcaggatcatatagaagatcagattgcggaaaacatgcatgccggaatggaccgtgagcgtgcagaaaaagaggctgtcagagatatgggagatccggtcgaaacggggatttcccttgatcgtattcataaaccacagattgcatggaagcttctggttatggttatcctgcttagcgttgccgggattttgacacatatcatgattgccagacatatcaatgagggagatgcgtctgtttccggaagatacgtgattcatgtcatggtgggaattgcagtcatgattttcctgtactttttggattatacattattagcaagattttccaaggtgattgcagtcatattattagcgatgtgcttactgaccttgtattttggatgtaaggtaaatggtatgagatatttcataattatagggggagggtctgtatccataccggcattgatgctgttttatgttccgatatatggaggtgtcatatatcaatatcatggatctggttatacaggattgctaaaagcaattgtatggatggtgataccggttgttttggttttgcggatgccggcaatgatgacagccggtctgatgctgatatctatgcttgtgatgttgacaatcgcgattcagaaggactggtttgttgtacagaagaaaaaagcaatgggcggactttgggagattttcatggttatgccagctgcagttttccttatgatgtatttgggaaatgctttcgcaccctatcagaaggcacgtatacaggcagttttttctaatagtggagatgtcagttatcttacagcgacattgcgttctttattgacagtaaataaatttgcgggaaacagcggggtggatgtaacggaaatgttgcctgcgtataatgcagattatatattggtttatttatcatctgtgtatggaatgctcgcggcgattcttatatgctgcattttagccgtgttgattcttactgtttttcatacagccatgaggcagaagaaccagttgggtatgatgatgggatgtggatgtggcatgatatttcttgtaagctttttgataaatgtattggaaaatgtaggagcatttccaccggcagcgacatttatgccatttttatctgcaggaggaagttatattattgtttcttatggactaatgggtattgtgctgagcatatacagatataaaaatgtttatccgcagcatgtcaggattcgccagaataaaaaaaggattataagtagagtatcgttataatgatggaatgggttggctcggagatgaagcgtatacaggctggtggctattgccggaatgtgacaggaattgcgggaaattacttagtgcctcgggcatgccttatgaatatggcaatatttatccaaaagctgtttttcctaacggagagattggttttcatggaagaaatatctttcatagcgattttatgatacgtccatgcattttgctgaatgtatacagggataaaaatgactaccgggagtatgatcttgcgtatatacagacttttgccggaaaagagcgaagagatggaatcggagaacgttgcgtttatcatgatgtttcattgaaaaaatggcgattaatcattcagttggatgcagagagatattacttcctgtctgtatttatcggggaagacggaagattggataagttttcacttgatgaggaaggggcagcagattctcattatgaatttaaagaggaaagagaaattcgaaaaaaactctatgtggcaggggatgaagataagtatctggacgaaatcctgattcgatatgctgctcaatacggaccacagtgtctcaaaggactgatcttaccatatgtaacagctcagtttcattatgattaatgcatttaagggactgtcgggaaataaacagtcttgattagggagaggtgtgactcgaacgaatcacacctctccctaatctttataggaatatgcatagcagatgattttgaacatattgttctaacttgggtttgaaaatttgatttttacaattaccttatttacaattagagcatgtaaataagctgtagaggagaacccgatagtgacaaaacatgataaaatccagtggtttatctgaggaaacagtatagccaaagtgaatggaagcatagtaatgcatatacataaaagtgtatagggcaaatattttaatgaaagaaaaagtgcaattttaagtgtttgactaaaattttgaaagtaagtatccgaaataaagttataaaaaagcatgattccatataataaaaatagaatagtgaattggatcgctgccagacacagctttatcgtggtataaggcataagcgggaggattttaagatcagcaccacaaatgcaggcagaaatcaatacgaatatccacaaaacagtgctgcgtttaaaagcatttttccatgcggtaaaataattgcgcacaatgtatgactcagtattgttcacgagacgaagagcagtttcgcaaagagcttttaaagaggcaccgatggtgattattggaaggctggtaattagaaataataaatttaaaattaccaaatctacaattttgtttataaaaagaaataatttactgtcgacattaaataaacgttccaaaatgtttgtcctttctgaattgttttttgtgtgttcacgtaattgtcagatgcttactttgtggaatcccggataatcaattctgttttatattcagaataaacacgaggtgagtgtggaaattggattcgctccaacatttgtctggctgctgcaatccctaagtatttcttcggtgtatgaatcgtagtgagtgccggtataatgcgctcagaagcggggatatcgtcaaatcctacgacgcttacatcttttggtatctgatagccgagaaattgtaaagcatacatgagctggatggctgtccagtcgtttccacaaatgaatacgtctggaagggatggcatatcctggattttttttacgacaaattgaaaatctcggaatgcatctgacgtctcatgaagaaggctgcatctggaatcgagttcaagatgattgttggcaagagcttcgcaaagagcttcgtaacgttcttcgaaccctcgccctacattttttgagaataagtcaccaatgaagctgaaacgtttggctccattctcgataaggtggtcaacaattcgataaatattttttttattttccatcgttatgacatctatattttctaatgacatggtatcatttctgggcaaatctacagatacaattggtaaattgtatttagtaagtgcatcacaaacggcttcgtcacatatttccacaataataattccttttatggatgggtcctttaatgcggaaggaaattcaagattgtttaaatcattttctgacataatgcctataacaagatgataatttgcgctggacaaaatgctttcaatgccagttaatacggtggtccaaaattcggaatcaggggcatatgtacgtgtaagaaacataatagatccattgttgagagtagcaggctcgtcaacagatctcgcatttatgctactgagtaattcctcatcaatatttttataatttagttcctgtgctttttttacaactaattgtttcgttttaagagatacttcatcactatttttgagagcttttgctacggtgtttctggaaagttgtagttcttctgataattgtttgattgtgcatttcatgttgctacctcctgcatatattgtaacatcatatgctgaatatgaaaagatacaataatgcaaaaaatagaaaatgcacgaaatgcgcaaaaatgaagaaaaatactgtatataatgtacaaaaccaataaaaatattatgtctaaaagatggaaaaaatcagaaatgcataaatagtattgaaaaaaatgcacgattgatgtattataaatgcaagataaacaggaaaaagaaatgcatataatcgtgcatttagtgcaaaaaggaaggcgagtatgaaaaaattattctatcaaccaaaagatgcatgggtaggagatctgattccgtactgggaagacggtaccttttacggattttatctgcatgatcctcgcattaaagataaagaatatgcagaggaaacaacatggcatcttgttacaaccaaagattttgtgaatttggattacaaaggagaatccattcggagaggtgctgatgacagaccgaacaagaatgcttatacggggtcagtaataaaagactcaaatggtatttatcatgcattttatacagcatataatgagaagtttaaaataaacggaaaaagcattcagtctgtgatgcaggcgacaggatctgatttggagcatctggaaacaatggaagattttctgtttgtcgcggatggggttttgtatgaagaatttgactggagagatccgtttgttttctggaatgaagaggatggatgttattggatgttactggcatccagattgaaagacagtggagcgctgcgaggcggatgtattgcactgtgcaaatcgaaagacttgataaactggtcgtacgaaaaaccattttatgcgccacagatgtatgtgacaatggaatgtccggaagttttccggatgggagagtactggtatcttgtatattctacattttcggactgttttacaactcattaccgtattgcaaagagtttggacgggccatggatgataccagaagatgatgtgtttgatacgagagcagattatgcgattaaaacagcttctgacggtgaacatcgttatgcttttggatggattgcaagcaagtatggaaactgtgattttggaccttgggaatggggcggaacaatggtgtttcatgagctggttcaggaccaggccacaggagctttaaaagtaaaagtaattcccggagtaagagattactatacgaaagaaaatgaaataacacaaataacctcttacaattgcgagctgtataaagaaaaaaatgcagttgatgtgatgagtcagacattgggcgcaggattatatgagattccacatgattgtttttcaatcgaactggatgttcatgtagaacaggctcatgaatttggaatagcgcttcatgtggataaagatatggaacaaggatattttttgcggatgaatccacgaaaaaaagaaatggcatgggacatgtggccaagagatcatcagggaaagtatcaatggcaaatcaaaggagatgttccttaccagattgaaacagccaggagacttccggaaggaacagattatcacatattgataattcgagaggaagatatctgtattgtgtatattaatgatgaagtagtaatgtccaccagaatgtatgatcataaagacggatatgccggagtttatgtagtacaggggtgtgtcaaaataagcaattttaaattaaagataaagtaaaggaggaagaaaatgaaaaagagattagtaagtgtattactggtggcttgcatggcagtttcgctggtagtcggatgtggagcaaagaaagagaccggcggggaaagctcggaagatggggttacaactgtaaaatggatgacatccagacctgttgatggtgaaattgatcaggttatgagagagattgcagaccagtatagcaaagagcaggggggcaaatggaaaattgagattgagacaactgcagacagaccgtcatatcttcagaaattgaaaactttgattgcaggcaataatatgccggatattattgacattgatgcagatccatattgcaaggaattggtagacgcaggtaaactggtagatgtcaaagctttcttacaggaaaatgacagatatgacaaattctatccaactgcattgaagtatcaggaatttacagatggttctatgtatacacttccattagaataccatgtagaaatgacttggtacaataaagaaatttttgatcaatacaatttaacaccaccaaaaacaatggatgaatggttaaatgtatgtaagacattaagtgataatggaattacacctatttctgtagatggtgttgaccgttggccggtacaaagatatctggcaatgttgccatttagagaatctggcaacgattttattattaaccttcgtgacggtaaggctaagatgaatagtgaaacaggtataaaagcagcggagttcatgaaagagatcggccagtattttaacgatggttttgcagctacagattatgcaactgcacagtctatgttcctcgatggaaaatctgcaatgtattatattggcgattgggagattgcagctatgcaagatgcatatgcagagggaaaaattgattatttctatttgccgatgaccgatgatgcaacgacaaaagaaaatgaattttgtgtaaactcaggaattggaatggcgttcaatgcagaaacttttgatgagaaaacaaaggattttgtgttatacgtaattgatcactatggagaaatgtatgttgcgaaacagcagatgacacctatcaaagctgagctttctgatgaagttgattattcagatctttatctcagaattcaggaagatatgcagaataccggtgagaatttcctgaaaccgtgggatacatatcttgatgctgacactaatacagttatgcaggataatttattgcttctggcatctggtgatttatctgtagaagatttttgcaaattaatagatgattctattgcagcaaatgcaaaataaacaaaatgtccggggcgtgtatacaccctcggacattatatattaatggtaggaggaaactatgggagtaataagaaataaaaaagcgttctttgcatttttgcttccgggactgttattctatatatttactgtgttctatccaattgtagaatccattcgacttagctttatggaatggggaggtattggcgacaaggtatttgttggcttggacaattacgtaaagatgtttcatgatcctgtattttatacagcctttatcaataacttgatttatctgctgattgttgttggtatgcagttgtcgatcggacttttctttgcaattttacttacttatatgacgaagtatgtaacactggtgaagacgttgtattatgttccgtgcattataacaacagtggcaatcacacagctttttagaagcatgtattcggtagaaccgatgggacttttgaatcagttccttgaagcggtaggtcttggggggatggtaacatcatggcttgcagatgtaggaacggtattggcggcagtatccataccggaaggatggagatttacaggaatgtatatggttattttttatgcagcattagtatcgcttgatccatcggtatatgaagctgcaaaggtagacggggcaagtgaaatgcagatattgtttaaaataaaacttccattgataaaagatattattcttttgacacttaccatgtgcctgactggtgcacttagaggttttgatattccgttccttttgacaagcggcggcccgggaaatgcgagtgaactgatgtctacatatatgtataaaaaagcattttccagcaatcaatatggatatggtagtgccctggctgtatttattattatagagagcattctcgtagtatatactctgcgcaagttgtttacatcgaaggaagagaaagaagagcgaaagatggagaaagagcgtcgcagacaaaggagggctgtcagatgaaaaagaatgtaataaaaattgtatttgtcattttaattctagtgtttctggtaatacagatttatccggttatctggctgtttattgcaagtgtaaagccaactgtggagctcgcaagtgaaccgtttgcttttcctaagacggttacgtttgaaaattttgtaaacgtattgtcagatggaaaaatcggtatgtatatgtggaatagcttgaaggtaacaggactttctctgattttaattgtggtgttaagctcaaccgctggttatgcgttgtctaaattcagaatgagagggaaaaaacaaatttattcctttttcacatttggaattatggtccctgtacagattacgttaattccgctattcatattttatagtaatgttggaatcctaaatacgagtatgtctctggttttaccacaggtcggatttgcattacctttatctgttatgatgtttgtcagcttttatgaatttgtgccgaatgaacttattgaagcggcaattgttgatggatgttcgccgtttagaacatttatacagatcgttttcccgttagcaagaaatacagttattacaattgcgtctatgtacagtatattaatatggaatgatttcatatttgcaaatacatttattagtgaaacgaatgcgaaaacagttgccatgggattgaaagattatgtaggggcttttggaaatgtagactggggctccacgtttgcggcaatagctatttctattctcccaccgctaataatttatttttcacttaataaatgggtaacagcaggtatgacaatgggtgcaacgaaaggctagggtgagaaaatgatgtggctaccaggaggtatcgggacacttccgtatcttacaagaggaaaaagcagagcgattaatgcagaaaacagaagcggagaaaagggaaaaggtggaatggcagcaagccatcttggcccgtccagaaaaggaagcccctgcctgaaagatgtgcagtctggcgagacagtagtattgggtgaaattgatggaccaggcgtgattgatcatatttggattacagtggataacaaaaccacagaaggtgattgttttgtactaagagatttggtgttgagaatgtattgggatgaagagaaaacaccatcggtggaagtccctttgggagatttcttctgctgcggattcggacaggaatgctttgtaaactccagcgcaattacggttgttccatccagaggattaaattcatatttccagatgccttttcgaacaaaggcaaagattactctggaaaatcagcatgcgaatcctattccggcatttttctatcagatagattattgcttgtatgatgatttgccggaacaaacttcatatttccacgccagttggagaagacaggcaattacagagctagggaaggattatgtgattattgatgaaatcaaaggatgcgggcagtatataggaacgtatattgcgttatcgacccttcagagatattggtggggagaaggagaagtgaagttttatattgatggagataaagagtatcctactatttgcggcaccggtatggaagattactttgggggatcatggagttttgcttcacaggaaaatggcagaacggtagaacacacttacagtacgccgtatcttgggtacccttattattctaatcatgatgaactgatacataatccttatcacaatgatgactgtccgccaatgaggggattttatcgctggcatgtcatggatccgattttctttgagcgtgatctaaaagtgacagtgcaacagattggtgtgggatacaatggattgtttgaacgtcaggatgatgtatcaagtgtagcatactggtaccagagtgaaccacatcaggaatttgcaaaactgatggataaagaaaaaagatggccaagataaaaatccaactatattaccattgaagtttaagccgcccgatcgggcggctttcagactgtagacaaagttggtgctggagtttaactccagcaccaacttttctgtatgaatggaatttctcgtttcttttattaaagagtgcaacatatcatatgttttctgctccttttttgccaggatttttgccagattctttaaattcatgcatgcgtatgtaagcccgactttcatttccattcgcgcttttcctttatattgtgtatatcgaaaaccatgttgttcttttgcggttccgaaaatccgctctatggtttctttacgtaaatcatagatttctttatcatctggctgtgtctggcacttccgatttctatggtaggatttgccgtatttgggcgaattgaggtttatgattcaccagtgatctttcagcttctggaaaatggaaaacgaaaacgcattcaccagaagagggagaacaggaaaactttacttatgcgttggaagaatgtcagggagacaatgggaaactgggcgctgccgttattcattgtattaccattatttgtcatgactgtttatatgatcatgaatccctggccataaagcgacagtaaagagcagtgatgtatgatttggaaagaaaggggtgtgaagatgaagaaaacccagaaaccaagaaaaaatagaaaaacaggtgcagttatcgtgatactgctcggcttactttgtgctgtctctacagtaagattgcaaattctgctcgaacggtacgcctattctgaaatcggcggtacattcattctgatttggcggtacgcgttttctactcaaaacggtacgtttttcctttattattgtgatgtaactattattcatcacagtgcaaaggaggaactattatgcacgactacaatactattcttggagtcatagaacttcggctcagtaaagtcagttatgactctgttcgtagggatggtagtcacatttccgatacccaaactaaggcggaattccatgataacttcaatgtcctgattgtggcagaaaagtatcagaccggttttgatgaaccgctgcttcataccatgatcgtggataagaaactgaaaaatgttaaggcagtgcagacgctttcacgtttgaaccgtacctgccctggtaagacagatacatttgtcttggacttcgctaatagaaaagaagatattctggatgcattccagccgttctatcaggaaaccagtctggagcaggaagtaaacgcagatttgatctatcagactgagcgtgagttgctggattatgcaatttacaaccagaatgatgttgtggcattcattgaggtttggaacaaaccaggaaagcaggatgatagagcaatgggacgaatgaccagtgttcttaagcctgtggcagaccgttataacttaaagaatccagaagagcgttaccagttcagaagactggttcgtagcttgattcgttggtacagctatatcacgcaggttgccagaatgtttgataaggacatgcataaggaatatctgttcctaagctatctgattgggttgcttccaggtgaaacagaagatccgatcgatctggatggaaagttgaagctggagtattacaagctgcagaaaacatttgagggtgagattcgccttgaaaatgttgatggtcagtatgttccggcgacaagcaagagtgctcagggcaaccgtcagaagagtactctggatgagattctggagaagattaatgaaaaatacaagggagagttcaaggattctgaccgtgtaatgatcggtgctcttcatgataagctgattgcagataaaaagctggaaagctctgcaagaaccagtgatccaagaatatttgtagagagtatctttcctgctgcgtttggtacagctgcaatggaaagctttatggaatcacaagagagttattctgccctttttgaggatcagtccaaatacaatgctgttatgagtgcattggcaggagttatttacaggaaaatgaggcagacaactactactccatccggtcagcaacaagagtttacactgatggaaaattttgctatactccattaaaaaacagtattggaggatgcaaatatgccacgttatgttgttacacttacagatgaggaaataaaggaattaaaagccctggtacaaaaaggcggtaaaggctaccgcataaagcatgcacagatcctgctgaaactggatcagaaaccagaaaataaattctggacatatgaccgcatcaaagatgcgtatggtgcttctcacagtacaatcgcaggcattgccaaacgtttcgtaatggaaggaatggaggctgcactgggaagaaaaaagcaggagaaccgccatcgcaaggtaactggcgatgtagaagcacgcatctgtgccatagcgtgttcagcacctcccgaaggagcttcccgatggacaatgcaggccattgcagatgaactgatccgcctggaaatcgtagactatattacagactccaccatctgtgaagttatgaaaaaaacgaaatcaagccgtggcttgtaaaggaatggtgtattccggaagccgatgctgactttgtagccaaaatggaagatatactggatgtataccaacgcccatatgacccactgaatccggttgtctgcatagatgaaaccaataaacagctcataaaggaaacacgaatcccctgtgagccgggtaaacccgaaaaagttgattccgtatatgttcgtaatggtgttgcagatgtattcatgatttctgaaccattggcaggcatgagggacacggttgtgacccaaacccggacagccctggattttgcagaaatcctcaaatatacctcagacactctgtatccagatgtggaaaaaataatccttgtcacagacaatctgaacacgcatgcaccagcctcattatacaaagcattcccgccagaggaagcacgcaggctggcggaacgttttgaatggcattatactccaaaacacggaagctggctggacatggcggagattgaaattggtattatgagccgtcaggcactttccaaaccacttccggatttggaaagtttcaaaaaacaggttcgggcttggacgataaaacggaatgcagaacacagaaaaataaattggcagtttacaacacaggatgcaagaattaagttacttaagctataccctatagtactttaaaaactgaccggatggagtactaggatcagtgtgaaaatagtttgtgccttataaatgaatactcctcaaaaaatactcctttccgatagcgatttttgttggaaaggagtatttttatgtctgaagatacagtgtttttctggttatccggggacaattatataatcttatgctccagccattttccgtttctgaaccgtatggtaaaaataatggctctcacactccagtctgtgaacatgccaatccatacggcaatgggaccgaaacccagtacccgggctaaaaacatggcaaggcttacacggcagatccacatggaagctgcagacacgcccatggtaaattttacatcgcctgctgcccggaaaccataggcaggaataaaggaaagaacccagacaagaggctttacaatggtgatacaggttaccataaagatacacatccgggcactttccggttccattccgccgaagtgagtgatggggcgcaccagggcaaaaatcagaaggcaggagccgatgatgacaatttccgaaactgctgtcatcttttttatatagtagatggcttcatctttacgacctgccccgatacattcaccaactaccgtcataagccccacaccgattccgattgccataataccgtttagattttccagaatattggtcataccttgagcagcgattgaagtagttcccatcattgagaccgtgctttgaataaccagtttcccgaactggaacatgctgttttcaataccagatggaattcccagatacagaatacgcctgatctgctgccagctggggcgaatggaggcgtatttctgaagggaaatcagccacccgggcttatgtaattcatataaaacaacagttatggagaagcctctggaaataaaggtagcgagagccgatccgatgactcccatatggaatccccatacaaacagcagattcagaatcagattcaacacattggccagcagggaaatcttcatggggagattgctgttctcctgtgcccggaaaatggaagaaccgtcgtcgtacagagcaatgaaaggatagggcagggcagatatcataaaatactgccttgcataggtcatgacatccggttccacatctccgaaaatcagtttcaggagaggcttgttgaagaaaaagcagatacttccgataattatggataaaataagtgtaataaagacaagctgttccgctgcttttctggcttccttcggtcttttgcagtccagaaactgggaacagatgacggaaccgcctgcggccagcgcatagaaggcctgcacgaccaggacattgatagaatctaccaggctgacagcagaaatagcggccgagcccagattactgacaatcatggtccccacagtacccatcatggaattcaaaagctgatcaatagacaatgggagcatcagcttccataaatcagcattggaaaacatatgtggctgtgtggttggaacattgcgtttttctttcagtttcatttctttctcccttcaccgcatttcagtatacgaccggtttttatttttgtacagaagtttttttactttcccggtatgcagagggggaaatccccagttttttcttaaagctgttgctgaaataatactggttggcgtatccgcatcggctgctgatatctttcagggagagattggattctgtaagatagcggcaggcttcttcaatacggaaagaggcaatggtatcactgatgctctgccctgtgtttttcttatagagtgcgctcaggtaggcggggctcacattaacgtgtctggcaatatcattcaggcataatgtgtgatcttcaaagttttcacggatgtagcccacagccagttcacagatctggttatgatatgtattctgagaggtgtccagcttttggcagacgaggctgcagaatcggctcatccattggtaaaactgttcgtaggtatcgaaacggtcaaaacggttataaacggagacgatttccgactccagttctgaggtgtcgatgttcagctcatacaggaatttcagaatgcgcccgagcagagagtagattcggatgaacaggatatttttcgccagacatttccgggaaagatcttcaaaaaaatcatggagcaatgtatcgacagcaggtagatttttctggcacagaaggctgatcagttcttcttcacgggaatcggaaatggaaagcaggctgaattcctgtccgggtgtttccctggcatcaaaaatatttttatggggaaagaaaaaacggtatttcagggcatatgatgcattttcataggaaatatgcaggtcccagaagttattgatgatggttccaacaccgaagttgacattcaggagagagtcactgtatgcatcgcagaaagcagtcagtgctttgtgaatcacctgaagaaagtgatcatgattttccgtattctgggccaggatacagataacacgactgaattcccggatgtaatagaccgaatcaaagactctgaactgttctttcaaagtgtccagagcattcatcagttccatctgatactgaacgattcccaactctgattcctcttcggaagcattctcaatttccatcttgatgacggaaaagctgctgtagttcaggtcaagattcaggtattttgcataatgtcccagatgggatgcagcatcactgccggcgtaattcagaagatccagaaaaaatttttccctcatgacagggcggctctgctccagcagttccatattgcgtcgctcccggtctatagaagaaaatgcattttttactttttccgtaagatactggtaatcaacaggtttttcaatgtaatcacacacaccgaggcggatggcctgttttgcgtattcaaatttatcataggcgctgatcagtatgattttcaccagcggattcatggaaagagcgacgctgctcattgaaatcccgtccagattgggcatttcaatatcggaaataatcaaatcaacgggagcaaggcgaagcgcttccagcgcggattctccgctgtaagctacatggagaactctggcatccagctgttcccaattgatatttttgataattccttcaacagataaataattatcatcaacaatcataacagttttcataacgattcctcttttcaaaaaaatggtatgctatgctattcttccatctgagcaaaggtgatggtaatttgtgtgccctttcccggtatactgtcaatttcaacagttccgtttccgaaagacgggctggaaattcgtttgttcacattgccgataccgaaatgcttttcgtaatcaacggttttgttttttaatgtatttttcagctcttccagctgttcggattcaataccaattccattatcacagatggtgatgattacatcatcatcaccgtatatgacatctacgatgatgtggatggtcggagtcgtccgggagtagccgtgaagaatacagttttccagaaacggctggagagtaaagcggcagatcaggaaattttcaattccatcttctgcgtggatttcccaggacagggtttcattgtggcagagtttttccatattcaaatacagtcttgcaatctccagttcatcccgtatgagaatccggtcgcctgatttgcgaagtgacagacggtaaaactgtgtcagatccgtaatcatctgccctgcaatatccagcctgccgatactctggcaggttttgatggttcccagaatgttataaagaaaatgaggattgatctgggattgaagaagctgatatttcagtttttcttctgaaagtgacagttccagtatggattccatgttttccctcagggtcgtctgcatgtttgtaaaagcaagtcccagcttatcaatttcatcgtacagttccggttccttatcctcgggcaggagaggagcggtctcctgaatctgcacatcggaatcattaccgatacggaaattttccatggcatcggacagtctttttatcctgcgggaaagattgccggtaaacaggaaaatcatgatgacaatcagaatcagtataattgcaattgcggtaatcatggttctcaggagttccagcgtattggcgctgatgtaggaatccggtacttccgtaatatggtaccagccgttgtccagctgtatagtgtgataatgcatccgatcctgcgtaaagatagattctgtccggttcagaagcagacttcgtttttcttctgacagaacggaaccgcacagttcccggctggtgtgtgccatgatggtaccgtcttcggaaatcagatagctggtgatccggtcatcctgaaaggtttccgacagaagatcggaaaattttccgggatttaaaagaatcgcataggcatattccggttccttcgtggtctgattcttcaaaagccggcagcaggtgatgacatcactgccggtttctttatctgacagaacaaaaggcagcctgatatctttctgataggaccagatggagctggtgcctggagttttcagctgtgtttcgctcagatcgaacattgaaaaatctttcagggaaagaaaatagagcccctcgaaggcaccgagctgtgtatccggaagaaagctgtaaatatgataaaagccgaaagtggttttatacagatagatgctgttccgtacttcattgaaaaccgaacggtacctgtcaggatcgtcctgcgcgctgaacagagtgtatatgttgtactgaatggaatcagcagtattttctgtctgctgcagacgattattgatctggacattcagctggtcgtctgacagaatcaccgagttcatgattttttcggaggcaatgcggtaggttacacgatacagactgacttccatgatgcacagcggcaggaaaacacacaggaaaaaggcagccagcagttttgcacgaaatccgggaaaaagtgactgtattttacgaaatattttcttcaaaacggaatgttcctttcttttgttttatgaaataattataaaaaaaacagaatatgatttcaacaaagataaaaataatataaatcattcaaaaaatattgtattttgttttttttcgcattctgatatcttaatgccatcaagaacacagcaactgaaaacacagcaacgaatacggcagaaagaagccggagaatggaggaaaacatgaaaaaaagaacaatcagtttattactctgtgcggccatgtcagcaggagtgctggcgggatgcggcggctcatccgacagcggagatgcagcaaaaaaagacggagactatgatctgacactgtacagcgtcaataccacagatgcggattttgacggctggcttcagaatgtggaggaagccaccggtctgaaaatcaatgtcatcgcagcacctaccgatacggatacccgccagcagaaaatcacaaccgtactttccaccggcgacagcagtgtggatgttctggaaatcaatgatgaaatgagtgcatcattcaaaaataccggatggctggaatcactgagtgatacggttatgacagaggatatccgcggtgaatttgctcagggatatcttgaagacatgattaccgacaaagacggcaacattgtgggtgttcccggatacgcaggttatctggctttctgggtaaatcaggaaatcatggatgaagtgggaattgaatccatcgatacgaaagaggattttatgaactacatgaaagcggcttcaggaaacggcagatacggctatggcggttcatgggagaaaacctatgtatctaacgaactggcacagtttgtaaatatgttcggcggagattattttgactggaccaatccggccaacaaggaagctgttcagtttatgcatgatctggtggcagaaggatatacccccattgatcagattgcagacaagtatgagcagatgaatcccaaggccaatgacggtaagtacggcagcctgttcatgtggggactgggaactgattatgcaaaagcggatatgttgggcgaagacaagattcatatggctatggtacctgatttcagcggaacaggcgaaagagcaatttttaccgattcctggaattatgttctgaacagcgcatcgaaaaacaaggaagcagccgtaaaattcctgcagtatatggcatcggaagaaggcgtgaaagcatcctatgaagcatttgaccgttatcctgcaagaaaggatgtagcggaaaaagtggttcccgatacagatcctgcaaaggagatatacagcagatacgcaacagaatgcaatgtgcagggacgtcccatgcttcctcagaccatggagtttattacagatatgggaacgattttccagtcctatgtaaaggatgaaatcacagtagatgaattctgcacaaaggctcaggaatatgttgataaatacagtgaataagctgacaggctgctgaaaacagccttacataaaggaggatataaggtgataatcagtaaaaaatcaatgaaatggataccatggcttctgattcttccggtagtatttcttcgcgggtttactactctttatccgattctggtaactgttaaaaacagtttgtttgatatcaagattctgtcgggagttaatgagtttgtgggatttgccaattatataaatgtgtttaaggattccaaggtcatcacttccattgagtttaccgccatttttgttgcagtatccatggctctgcatgtgattctgggggttgctctggcgctgattctgaacatgaatttcaaaggccgccatttcctgagaacaatcgtcctgattccctgggcaatgccgtcggttgtaatcggtatggcagcaaaatggggatttaacaatgattatggtctgatcaatgatctgatccgccgatttttgccgggcttcagctgtgactggctgatcaacaccggtacggcaagaggtgcggtaattgccatggatctgtggaaagaccttccgtttttcgcaattctggtgctttccggtcttcagtttatctcaggtgatatttacgaagcagcgagggtggatggcgccaacggtattcagtgctttttccgcataactttgcctctgatcatgaaaaatgtgctgacactctgcattccttttactctgtggagactgaccacctttgatctggtctatgccatgacatccggcggtcccggtgaggatacttctctgatcgcctatcgaatcgccacggaagcttttaccaatctgaatgtgggatatgcttcagctctggcagttatgctgttcgcggtaatggccatcttcagctggttcaatatccggcttacaaataaatatgcggattaaggaggtttcacaggagtatgaagaagaataccgtttcgggacaaacaggcagaaaggccaaaacaggcagaaaggccaaaacaggcatgaacagatatgttttgggcaaaggtattgtgggcgcagggcgctggatacttctggcaatcgtatcgtttctcattctgtttcctgtattatggatttttgtatcatcaattacaccgccgggagaattatttaaaacaccgatagactatattccggatcatcccacactggacagctatacatttctgattgaaaatgtaggtctgttcgaaaaaatcggaaatacgatcctgatcgtaggagttacattgattgtcagcacgattatcagcgccatggcagcatatgctttttccagattcaaatcaaagggtattcagatcgcatttgcatttattctggcaaccatgctgattcctgaaatcgtaactgccagaccgctgtatgaatttatgcagaaaacaggattgtatgatacgtacccgggattgattcttctgtatatcagcggtgttgtaccgtttaccgtactgattctgaccaattttgtaaaggagataccggtgtcgctggaggaagcagcggccatcgacggcgcgactttcctgcagcgtttgttttatgtggttctgcctctgttgaaaccggctattgcaaccgtatgtatcattaatttcattacgtgtctgaataactttttcacaccgctgtattattccaatgggattcaggtgctgtcggtatccatcgttcagctgccgctgcgagacaatatgtatggagtcccctgggatctggtaagtgccatgggatggatcatcctgcttcctatcattatctttgtagcaatctttgaaaaacagattatggatggtataatggcaggtggagttaaagcataacagggaggttagtatcatgtttgatttatcgggaagtctgagttctctgcctcttgcaaaacacgtaaagagcagagcaatcaatgcggaaaatcccacaggggaaaaaggaaaaggcggtatggctgccagcgagctgggtccttccagaaaaggaagtccctgtctgcgtgatattgcaccgggagccacagtgacactggcggaaatcgaaggtccgggtgtgatcaatcacatctggattacagtaaccaataaaacgacggaggcagattgttttgtgctccgtgatctggtgttgcgcatgtactgggatgatgaggagactccctctgtggaaagccctctcggggatttcttctgctgtggtttcggcagagaatgcatcgtcaattccatgcccatcgtagtagtacccagccgcggtatgaacagctatttccagatgccttttcgcaaaaaagcgagaataacactggaaaaccagcatgccaatcccataccggctttcttttatcaggtagattactgcctgcatgatgaactgccggatgatatcgcctattttcacgcacagtggagaagagaaaaagtcactcagctgcagaaggattatgtaattcttgatcaggtaaaggggaaagggcactatgtgggtacctacatggcactgaccacgctggagcgttactggtggggcgagggtgaagtgaaattttatctggacggagatgaggaatatcccacaatctgcggaaccggaacagaagattacttcggcggttcctggagctttgccagacaggtggacggaaagaccgtggaacagaattactgtacgccctatctgggatatccctactattcgtctcacgatgaagaaattcataatccttatcataatgatgataccatgcccatgcggggattttaccggtggcatattcaggatcccatctgttttgatgaggatctgaaagtgacgatccagcagatcggcgtgggatacaggggattgtttgaacgtcaggatgatgttgcaagtgtagcctattggtaccagtcggagcctcatcaggcgtttgaaccgctggccgggaaggaagaccgctggcccagatagtacagtgagggtactctgacagtaccgtcagagggaagcagcgcaatgaggggtggcataacaaaagaatcggggaatttatgatgtatttggggagactgcatagagcattatgctgctggctggcagctgcactgctgtgttcgggatgcggcacggcagaagaaacagaacgaacatctgctgaaaacaaacagtatacggaatacatcacgctgatgcattcggaaagtgatacagaggaatttcaggagtatatcaggcaggcggaagaggaactgcagattggaatccgtctggttcagacaccaggcaatgcggataatcgtcatgcccggattgcaacgattctttcatcaggagacagctcggttgacattatcgggatcaacgatgaaatgatgagtgaattcagaaaaaaaggatatctggagcctttgggtgaggatgtgcttccgcaggaaattctggattgttatccgcaggattatctgaaaacgattgccatggagaatgggaaaatgtattctgttccctatatgctggatatcatgctgtactgcgtcaatcaggatctgctggaacaggcgggtctgcaggaagtacggacacagaaggactttgagcggctgcttgattattactccggagggaatgcgattttcggttacggaggggcatgggaagaatcgtatgcatataacgaaatttcgcagtttgtcaatctgtttggtggagactacagcagctggtctgatccgggttcaggaaaggctgtaaaatatcttcatgatatggtgcagaatcaggaagtagcggaaggaattttactcgatcagcacgaacagatggagcagaaatttttgtccggacagtatgcgtccatgtttctgtacagcgggtcggtcaatcttctgatgaaatcggaatcatatcggcagatgcacgtagcagctctccctgaatttgtatcccgtacaaccaacattgctacctggcagtatgtactgaacagggcatcagagcataaagaagctgcaaaacgttttcttgcctatgctgcggggaagaaaggatgcatgtcctattatgagaatatggactgccttcctgccagactggatctgattcagtcggagaaattcgactttcctgacatggatatcatccgggaatatgtgaaatccgtggagttgaaaccgcgttacttcacggaaagctccatggagggtatacgtgatatgggggatctgtttcagaaatatgtaacagatgaaatcagtctggatgagttctgcagaaaggcacagaaaattgtggagggagagcagaaaaaataaaaatatccgtctattcaagtgtatgaagatagaaaatccggttgctgctgcaggttctgaacagtatggaggagaagcacatatttgcgtgcagctccctgtactgttcagaactttttttgttgttaagggaattattatcaccgttgtcagatgttctgagtgtcctggatgagtaatctaatggagcagaataatccttgtcggaaatactgttatctgataaaatcagtatagttatagaagccatatggtagcagaagccatatggctacagaacagtatagctgcagattccgtgccgcttaccctgccataggcagagcaatccgtgcgaaccccttattcagctcatcttcccgccagtagctgcggagaatgttcatgccctcttcctgcatgtactgaggcagataaacaaaatattttttcaggcagtccatgagcagatccatgcggaaacggggaaggaagacatttttgtaatacggaagattgcgtgaccggacaaaaccattcagggcgtcccaggaacacatgttctggcagtacagatcaagatgtctgagggacagctcagtacggccagtgataccgcagccgaaatggtaattgtacagccggcagttgctgagaccgtagtaggattttgcatgacaggcaatcacaaagtaggtgtaagcatcctcagctttcaccagataatcagccgacagacagcggaaagccttttttaccatggcagttctgtacattttattccacactgtaaagcggtaaagtgtgtttctgaaacagccgttcagtacatcctgtccgtacagatacccatgataaggctgcagatttctggcagaacgcagaatccgttcaggttccagataactttccgcgatgattctggtttcaaactggagaatgtcaacgttgtggatcatcatctgtttatacaggatggaacaggcatccggttcaagggtgtcatcggcatcgagaaaaagcaggtatttacctctggcagcttccacaccggccttccttgcgtaacaggtaccgcggttgtggtcaagggcgatgacgcggatgcgtctgtcacggcgggcagcttcacggagcagagacagagaattgttggtggagcagtcatccacacagatgatctctatatcctgcagggtctgagatgttgcgctgcggatgcaggcggtgaggtagtcagaacggatgttgtatacaggaattacaatagagatgacaggtttcatacgcttagcctcctttggatgaatcattctgcaatcgttatcagaaaggctaagagtgggaaaaacaggaagtaaatatggggaaaagggggaatttaagaaaaagatgggggaaaatatggatagaaatcaaaaagaagaggggaaaaacaatcaggaaagcaatcaactgacgttaaaaagcgtatatgactttttctataaatgtgatagagaaaaggactgtgttttctatacagatgagtatgagaaactgccgccgaatataaaaaatgccagaaaaacacaaaggtattttctggatactcattttggagaatatcttgttcagcagggaaaaacaggagcttctcaatacatgctgggagagcatctgggcataaccagtactagttatactgatacacgctctgatatcatgcatgggaaatcaaaaagctgttgcgggggacagggacagaagattcggaataagctgaaaaatatgattgtctcggaatatgagaaggatcaaggctattcaaagacagttgccgatattgaaaaagcgaatgccgtacttttgcagaactggaatcttgatgtgaatgatgttaagcggaaactgagtatatttataacactaaaacctcaaaatttacgttaatagaaacctcgctaaattaggtttcaaatcataaatagttggtcatgtggcatcataatgatttaaaaatcgatgttttcttatgttttacgtcttctggatattgatttagcgctctttttggtgtatacttattacgtaatttacgttaataaaagaggcattattatgagtattccagaagagataaagaagcaaagaccaactcagtttggagcagtagaaatcagacatatcggcggtcattactatacttacctggtatcatcccgctgggatgcagaaaagggcagaccgcagaaagtcaccggtaaaagtatcggtaagattacagcggaagacggttttattccgaatgcgaacggactccggcttatgcaggaaatgcggctgacgccggatgttgcaccttccgtaaaaaactacggtgcttatgaaaccctgctgcagctttctccggagcttgaaatacagctgaaaaaatattttccggatattttccgggagataaggactctttcgctgatccgtctggtggatggcgtttcttctgccagaatgatccagcctctgttcctggattcctacatgagtgatatctgcagtgacctttctgtttcagaagggtctgtccggcgatttgtcgcgaagctcggaaccatgcaggatcagctggatgcctttatgaaggcatctgttatgcccgggacgacgctgctttttgacggaacctcgatttttacccgttccggtgattctctttcagccagaggatataatccaggacacagtctgaatccacaggcaaggattctgtatatctttgagaaagattctcataaaccggtattttacagggtgctgcagggctccattgtggataaaacagctttcatggatgttgtaactgcatccggatgcagggagtgcgtcatcatagcagacaaaggtttttactccaaacataatctttcagccctgatgtctgcagggatgaaatttatcctgccgctgagggaagatactgtgaatgtggaaccggaattttacgaaaatacagatgaccacaaatttgatggtgttttcacctacaacaaacgtgccatctggtatcgtaaaaaagccagcggaaacagaggaaactttatctatacattccgggatgaccaccgcaaagcggagcttcagggaaactatgtagaaaaagtagaaaaacactatggagaacagccccggcatccaatggatgttctgaaagaaacgcggatggggtatttctcattctgcagcaacatggataaacatccaaaggaaatttatctggattacaaggaaagatgggacattgaacagtgtttcgattatctcaaaaacagtgtttcaacatccgcatctcatgcacatactgatgaatatttcagaggctgggcatttctgaaccatataagcctgctgtattattatggtctgataaatgcgctccgaaacacaaacctcagcgagaaatactctgccgaagatattttaaaactgaccaaaaacatttacagagtaactatcagcgatgattcggaattcaaaatttctgctatccagaagaaaactcaggagattctgcatactcttggaatagacctattacgtaaaaaatgaggtttcagtgtgaaaaattagatttattccttgctttagcaagtgaatattttccggagatgttaaataggatagacagaccgattgtattagacagcggtgaactggtaggggcaactgctgataagatgggtgaagcatttggtaaaattttgagggataaaagaaggggactgaaataagtcatggcagatgaagaaaaagcaaaacagagtttgagtggtgtgagatttggcacaaaacacagttatgatgattttgggcttgtgcttcagaagaaagacttgtcacttccagaacccaaaacagaaaagattgaggtcacaggcagaaacgggggaacggttatgttaggttggattgtagcaggtttagtattttgtggttggatggcatcagcgtataagacagggaaaacaatcattgaattgaaaaatcagattatttcattatcatattatgcaggtgtaccgcattatcagatacaagaactgaaagaaaagtatggaatcaaataaaatggcatatttacaaggtgatggtcgaaaggctgtcacctttttgaatatatgagattgcaagaacaataaaaaataattataataagttacagaaagttgaggtgtatcatgaaaagtaaattttataagaataacccgttagatcagatttggtgcttttttaatgcttatatgacgattatatgagttgtcagcggtatctaaacgtgataaaatgctactagggaacaatcgtgttacagggtggcttgacctcattcttgaagaatgtgggtgatgctgatggacaacaaaaatcattttgatttcaaagacttaattgccttcggaatgttcattcttgcattgcttacattcgtttttacgttttgtaagtagcaatacatagcaaaaccaccctgatactttggtcggttgggtggctttgcttcttaatttatccggtcaactcacccagtgggcggttgttctctttacatctataatataacacgattgttcagagtgttcaatagaaagttcagggatagttatggaatttgaggaagcattgaaagtctatgaagattgttttggagaaaactatttcttctatatgggatttaccaaaacagatcaggaaattattgaagagatacagaagtgcatcaagaccggaagaaaacaaaaagccccccggtatgatgaagataaaatgtattgaatatagttcagagtgcataataattcatataaactggacttcttacacgttgcttacaaaaaggctgaaataccttgtaaatacaagtgtgtaaattatctaaacgttaatcatacgtttcagaacatacaatttcaaaagatttttcaactcctcaggacttcggttctggggagtttttgttacaatgcatacaataagaaggatttgattatatcaggatgaaagacagtgaccattgggtagtaggagtttgtcctgatgacccgcttgctcttgtgcagggaaggctttatccggaaattactgcaaactgcgtgattgcctggagaagaaatattccttattcgcaggcagtaaataagatgatagaagaaatcaatgcctatgatgaaatcattttaggatttccaatctggtggtatgtagcaccgacaatcgtaaatacttttttggaaaaatataatttttcaggtaaaaagatcattttgtttgctacttccggtggaagtggatttggaaatacggcaagagaattgcagacttctgcaccggacagcgtgattacagaaggaaagatatttcataatgtagtcaaacagcaaatcgctgaatgggtaggaacattataagattgatttggcgatcgaagtatcgggagaagatacttcaaatgaatggtgtgaactggttactgatgaggaatataagaataaagcatgcaaaaatgagaaatgcattttatgcaatgggaagttgtaattgtgtgatatattcggattcatcagaagttgtgtggatatcaatccaaagaatttctaacagatctccacgtatcttgaatttgtgggcgtgtgcatactgtgcgagctgttgtccccagtaagcactttgttcataatttccacgatatgttacgcagagataatcaccaccatcaatgagatcagctccttcttcgtcaataagaaaaacagattgataggaaagtgtttttttctttagtagagaggggagcgaaatcatagttcccatttgattgctgccaatgatatacaatcgattttgatttaagttgataagttgtttcatcagaaaatccatttcttcttcgtgtttgtatctttcgaagaggcgatgacaatgacgagggggaagtgtcattaagtggatttcatccaggggcagagagaatgccgaatgaatggtgtttagtctgtgctctacgtttttttgcagtttttgtaagtgttgcatttgtttggtaatagcttctttttcgtcttctaacatagaaagtgaagaggaaactgtgtgatgctccagatattcgcggatttgttccattgtaaatccaatagagcgcagatcacggatcacattgagtctccagatatcgtggatactataatgtcgatatccggattcagatcgttccggtttgataattccaatttcttcgtaataacgaatagaatctacaccaattccatatagtttggaaatttcaccgatttaaaaaaattttttcatatacctaacttccctccttgactctagtattataccagagtttatagtcaatttatagatttaataaaaaagtgtagaaaggatttttaaaatgcgctcaattttgaaggaaattaaattgtcatccgtattacttttattattaggaagtacaatactagcgtttggactttataatattcattcaatgtcgaatgttacagagggaggaatcctaggattaacactccttctggaatattggtttggcatttctccatctgtttccggttttgtgctgacgatattgtgctactttttggggtggaaattgttgggaaaacgttttcttatatattcttttatttcttctattggattttctgttttttatagaatctttgaacagtttgatccactatttccaaacattggcgaaaaaccacttttggcagcagttgtgggagcgctgtttgtagggatcagtgtaggtttgtgtgttcgagtcggtggagcgccgacaggagatgatgcgcttgcaatgagtctggaacgagtacttccattggatattcaatggatttatttgatcagtgatctggttgtattgctgatttctcttacctatattccggtgagcagaattacatactcacttctgacagttgttttatcaggtcagatcattggtcttatgcaaaagattcggtttccagaatatgtagaatccatagaagcattagaagatgaggggtagaggaatattttgaaatggagttaaaaaagcatacaaaatgctaattctcacacaattcatgaaaaatagactcgtattcctgagaaaaaacactgtctttattccataaaaatgtaaaatcatgcatgaccataaagtcggaaagaggaatctgtaccaaggttcctttttttaattcctgctcgacagcagctttgtagaggaaggatattccacagtcttcttttagcagagtgacgatcgtgtggatgttttcgatttccacaagatgtcggaagtctttgacagacatatttttcaatgccagtgtcttggtcaggattgccctggttccggaaccgtgttcccgaatcaaaagacgttcggatgtcaggtctttcaggctgtgaacagagttttcaaacgtatgatcagcagaggcaacagcaatgtattcttctgctttgtagatacgtgtttcgtaatgatccccgctaaaatatccttccacaattgcaaaatcgatcgttccctcacaaagataggtgagcagagtctgggtgttgccatatcggatgtgaaaatccatgtccggatgtgttttgacaaaacgggaaagagcaggtacgatcgcatattctccaatggtcatggttacgccaaaggtcagcacttttttccctttcagactctcctgcattcgtttttttaatgtattttcatcgtttctcatggtttccagagcagagcgtaagatttctccggcaggagtcagccggagttttttcttatctcttataaaaagctcggtaccgtaggtcttttccagatgtttgatatgctgggaaactgcgggctgtgtcagattcaggtgctcggcagcatgtgtaaagttcatatcgttgcatacagtcagaaatgtttccatgcgaaaatccaacataattgtttctcctttttcagatgtgtttatacttaaaccataacaaatatttatcatataatcaatacttataattttacaaaataataggagcgatttatagtatatatgaaaacaaggaaaagtaaaatgaggaaggcgaaaaacaggaggatatgaaaatgtatgatgttataatcataggagtaggaccggcaggaatcagtgcaggaatttatgcagtgagcagaggacaaaaaacactaattttagaaaaaaatcaggtcggaggactgattcgaagagtgtctgctgtcacacattatgcggcaattgtagagggagaaaccggggaaagctttgcaaagtgcctgaggaaacaggcggaaaatgcaggggtagaaatcctgaagaccgaggtgaaaaaagtagaattgaccggggtggaaaaaaggatttatacagagaaagaatgttattgtgcgaagaaggtaattttagcgaatggtacatcaccaagaaaactggggattccgggagaaatagaactggcaggacgaggaatcggaatgaatgcagcaaaagatgcaatgaagtatcgtggaaaacatgtatatgtgatcggaggtgcagatggagcggtaaaagaagcactgtatctggcgggggttgcagaaaaagtaacaatcatccattttgaagaaacgttgggatgcattgcacaatttcaggaaaaagcagcacataccccaaacattgaattacggcttcacgccagacttcatgctgtgtacggagtggaaaaagtagagtcattggaaatcttggatgagaaaacaggagcaattgagataattgaagattcgggatgtggaatttttgtgtatgcaggtacggttccgaatacagaattatataatgagatcagcttggacaatggatttcttccgacagatgaaaatatgcagacggaaatacccggtgtatatgcagttggtgacattcgtgtaaaacaggtacgacaagtatctacagcagtagcagatggaacgattgcagcaattcatgcagcacgataggaggcaaatatggactttataaagaaaaacgggaagggattacttttttgtctggctttggcagtgccttcagctgttttgggaaaattgtttccggttgtcggaggaccagtgtttgcaattttaattggaatgatactcgcattggtgattaaaaaacgggattcattggaaagcggcgtaaaatatacttcgaagaaaatattgcagtatgcagttgtacttcttggattcggacttaatttagaggtagtgatggagacaggaaagcagtctttgccgattattgtttgtaccattacaacatcattggtaatttcttatattttgcatcgcacaatgaacattccggaaaaaatctctacactggttggggtgggatcttcgatttgtgggggatcggcgatcgcagcaacagctccggttatcgatgcggatgaagaagaagtagcacaggcaatttcggtgatttttttgtttaatattctggcagcgttgatttttccggtactgggaacagcgcttggattttcaacaacatccggggaagcatttgggatttttgcagggactgcggtgaatgatacctcttctgtaactgcagcggcttctacgtgggacagcatgtatcatctgggaagccagacactggataaggcggtgacagtaaagctcaccagaacattggcgattatcccaatcacattggtacttgcattacgcagggcacggaaggctgaaacagaaagcggagaaaaagtgtctctgaagaaagtgtttccattttttatcctgttttttatcggggcaagtctgattacgacagcagcaacagcagcaggagtaccgacagaagtttttcagccattaaaagagctctccaagtttttcatcattatggcaatgggagcaattggatttcatacggatgtagtgaaattgatcaaaggtggtgggaaacccatcttaatgggaatggcatgttggttaggcattacagtggtgacacttagtatgcagcatctgctgaatttatggtaatcgtcaaaatgacaaaggaaaaaaccggaaaaatgcgaaattttatacaaatttcatagaaagtgttgccaaattgtggtatagtagcactattgaataaattttggaggttttattatgggacgttttgatgagaaaattatgctggtaaccggagctacttccggaattggaagagcggttgcaattcgtgcagcaaaagaagatgcaacagtcattgcggtggggcgcaacgaagagcgtggagcggctgttgtagcagcaatggaagaagctggtggaaaaggagaattcatgaaatgtgacgtcagcaacaaagatgcagtaaaggcactttttgcagaaatccaggaaaaatacggaaaacttgatgtcgcagtgaataatgcgggaatcgttggtgcttctaagacggtagaagaactggaggatgatgactggttccaggtaattgatgcaaatttgaattcttgtttcttctgctgcagagaagaagtaaagctgatgcagccatcaggtggagccatcgtgaacgtgtccagtgttgcgggaatgcgtggattcccttccgcagcagcttatgttgcaagtaagcatgcagtcagtggactgacaaaagcagtggcagtggactatgctacaaaaggaattacgtgtaatgcgatttgccctgcaggaacagatactccgcttacagagagaagttcagcagatattaagacgagaatggcagagattgcagcacagggaaaagatccgatggaatggctgaagaattctatgttgtctggaaagacagagacgttgcagaagaaaaatgcgacaccggaagagcaggcagcaacgattttgtattttgcaagtgatgaggcaagacacattacaggttccattgttgcaagtgatggtggatttactacatactaaaataaaacgaaacaaagaacctcttgggagtcagtcggctcctgagaggtttttgtctgtttcatagaccttttttacatcagcccggcatctgaaaattgtgcagaaacagatgagaagagagcatgcagcaaaaaaagacatgcagagccgataatccaagatttcagcagtagctcctacaattacagaaaggatgctgctgacagccatcagaatcatattttcaaatgcattgattctggcgcgcatggattccggaatgtaagactggacagcggcaacacgtaaggtggcactgtttgttccgagaaaaccggcaaaggcacggtttacgagcataagaggatatggaagccaaagcagaataagatccatgcattcgtaaaaggtatagactgcaaaagtaacgtggaaatttttcttttttggaatttcaatccggtactgcaccactccgccgatggtgcgtcctaaaaattcagcaatggaaaataaagaataaagtgcggcggacattccgggggcggtacggaaaaatgcgaccagaatgggagcatatccggaagcgaccccatttgtggctgccatatagtagtaaatagcctgtaatccacgttcttttttaaaatagcggagaacttcttgaagatcttctttccatacctgaaaagaaaatgttttttcacacacacgtgtttcttccgtcaactgaattgtgttttcaatgagtgcagcacatatggaaaacaatccttgtccgataaaaagccacggcataccgatcgtatccataagtactgcagccagaggcagcatgatcacacgcagtaggggatataacatggaagaaacggcatatcctttttgttccattccacttggtatgatctttggaaaaatactgttatatgccagttcatccagacttcccagtgtagcaagaagcaaagaatatccaagataaccaacgtatgaaaagtcgaaaaacagcaaatagattcccataagagcataaaagaatccattgatgaaatctccaaatacaagaaatggttttctgggaaagcggtccatccagggagcaaccaacagtgggattaaaaaattggggatcaattggattgcgattacaagagcagatgcaaaggtgcttccagtttcatcaaaaacaagaaatgacaatgcgaaattgcccacaattcctcccatacatccaaaagttgtagctgcaatcaacagagaaaaatttctggtccataagggattcttcatatcgtgatatcacctcctgttttttagtatacaggaagaatgaaagaaagaaaataagggaaaattgagaaaattttatgaaagttttcaggtaaaagacgaaaagaaagagatgttgaaaaaagaatccattctttgtacagaatgatataatggagctagcaaatgaacggagaataggaacatgttagagcacgaacaaaaaaatgtatggaaaatgatagggatgcgaattcgccgggaacgtatcaaaagaaactggagtcagtcaggtctgtgttatgggatatgtgcagtatcttatctttccaaaattgaacagggaaagatggaagtatcagaagagattttgaagcttttgctggaacggttagagttaccgtggattgatgacaaagaaacaaaggatttagaaagttttgtggaagcacagtatgaatttctatttacgcatcctatacaagaatttttaaaacaaaaagaaatatttcaagagaaaaaggaaaagttgtattccagttcgttgatcgcagatgcctgcattttggaagcagtatatgagagtcgtaaagatgaaatagaagagggattggaacgttacctggatttcaggcagcttgctgttctgcgtatgctgcagggaaggctggatgaggcaatcacattgcttccaattccgtttatgtatatgcgggcaggggagattctttatgagacaggccagaattacgcatcagctatttcttatctgcaaatgggctataatctggcagcccaggaagggatggcgatgctgatgctgcagtgccgcattatcatcggaaattgctacagtaatcagcaggaactggaaaatatggagagagagtatcaaattgcttcgcgtctggcaagagacctgcatcagacagaaatattaaaggtgatcaactataatcgggcatctacatgggtggcgcttggaagctataagaaagcgtacgactatttttcaaaagtagaagaacccgcgatattagatttgcataagcttgcaatctgttgtgaagcgtatggaagaaaagcggaggggatagaagctgtaaaacgcgcagagaggatgggagaattcggggatgatccagatgatgagaagcagttggaagtggaaatgtgtcgactggtccgctatcgtttggaacatgagaattatctgaaggaagaggaatatgaaaaacttttgtttccttgttttgagaaaatgaaagcaagactgcctgttggttttgcggtatttcatgtgccgtatgtactggagtggtatacagacagacgccaatataagcaggcatatgagatggtgaggaagtatgggggatttattcctgttttatagttttccaatcagcgcgttttaggtagcaaaataggggaaataatatgtttcccccaataaacgatctcatcctccaatcaggattacaaccttaaatgatgtatcatcataagaaatatccagtgtcccctcatatttttcgacaatatcccgaatagaagaaattccgattccatgagcagatttgtcttctttatcagaaatatactgatttttttggactacaatttcattgattttagaattgatcagttccagactatagcaatccaatcaattactgcacataattacacgaacgaaaccaccctaaacaatctgaagctcgaacggtggaaaatgccctttcgattgccggtggaagttccgatgcaattcggactttttccttccttaaatatgctttgagttttgaccccattttttcaatcgggtttaagtccgggctgtacggtggcagatacagatcgtttatctccgattcatccagcacctgtttcacgattttggcatgatgggaacgcatattgtccataactatgatgtctgttttggacaatgctggtatcagcattgttttcagatattctgcaaactgttccatggtcgttccgccgcaataaaccgtatggcatgttttccattcagtcgcacagaggacaatatcgtcgtattgcatggggtattaaccggtgtactgtctacagcacgttcattctttttggaacgggcataatgtcttgtcatgtccgtgtttacaccactttcgtcgagaaataccagatgatttgcgtcgttctccgacagatgttctctccagcttttccgcttctccttgacatcggggacgctcctgttctgacgcatgcagagatttctttttatagacatacccaagcttcaggatggctttgcgtactgtttcatcactgacatggagttgtaatttttccatgatttcatgaattgtaatatccggttgctgttggattagctggtctatgttttggaagtcattctgactcaggactggtttacagccacgttgggaggttctggtttccacagagccggtttcccgcattcttttttccaggcggtaaacagtgctggtattgaccgaaaagcattctgcgatttcctttgcattgtgtgtcttgtttcaggctttgatgagtaatttacgtgcttcattgtgtaacataataatcacctcttaactttatcataaaccccttgtcaagcgtgtgcagtattattttggcttgctatagatgtcagcatgccagcagtatggaatggtatttatgtattggcactgattggaatttatatgatcttattgtcggcagtggcacagagtcatttaaagcgcaataagaaaaaatactataagaatctggtatctgtcagtctgatgcgttttacagcaaaagcaacgaccagaaatatgtgtgtggtcgtacttcttttgttcgtgtgctgtggatctgcattttatggaatgcagtatacattgaatgattttgtcatggacagtaaaacagaccggacattttccatgcactatccagttttggagaaacagattggagcccgggaaattcaggatactgcggaaaatataaaatggaagtacagaattatgtagaagcagacgcagcaaatctggttatttcttatgaatgcagagatttcaatgaacaaggaaccaaatatctgaatatatacaaagaagaggcaaaagcatccttgtttcttctggaaacagcgtttgagcagatttatcaaacagaactgtctatgagtgatctgtttgcttacataatgaatgacgcagattatcaggacctgtcacagggattgcagaatcaatacagagagcatctgatattgaaagttcctatgaatttgccaaagatttattgggacagtatatggaaagaacaacagaactgtcaaatcggcagttgggattgtggaatatctgggagaaaaagcaggcggagaatgcaggggagacatatgggtatgatcaggagcttgatatgtcacccgaaaatacgacagttatacaggattggaagtatgctctgcatgtatatttgtattatcgcgctggcagcaatcggtgtgctgacctatgttcgaagcatttctgtggcaacagataataaagggatttttgaaagccttactaaattaggggcagaccatgcatatcagagaatggtactgaaaaaacagctggcaaaaatctttttttatccgggaattgtcggttgtggagcaggttttttattttctttcatgatggattatacaaatgatgtggggataacagcaattgaaatcaaagcgcttggaattcttctgttactgattgcaattttctgttttgtattgttttctgtatatcgtgtttctttgaaaaaagcagagaagattgtaaacttaaattaaaaacaagtttacaatcaagcgaccgtgtactatactgaagaaagaaatcagtatggaggaagaacaatgagtttgatacgggaaataaaggaacaggtattgcagggaaatcagattgcaaaggcagaggctttgcagttatatggggaaccattggaggaattatgccttgcggcagacgagatccgttaccagttttgtggaaatcgatttgatctttgtacgatcattaatggaaagagcggcagatgttcagaaaactgtaaatattgtgcacagtcagcctgttaccatacagaaattgaagaatatccgctgcttgcagtggagaagatcaaagagcaggcgaaatacaatgaagaaagaggagtcctgcgttattcgatcgtaacttccggaaaagcattgaatgacacggaagtggaacatgtctgcgaaagcgtccgggaaatccacaaagaatcaaagatcaaggtctgtgtgtctggcggccttttgaatgaaactcagtttcgaaaattaaaacaggcaggcgtcacaagagtgcataataatctggagacatcccgacagaattttccgaatgtctgtaccactcatacttatgaagacaagatcgcagcgatccgcgcagcttggaaagccggaatagaagtatgcagcggagggattatgggactgggagagaccgtggaggaccggatcgatcttgcattggaagtccgaaaattaggagtcaaatccatgcctgtaaatttactgaatccaattccggggacaccttatgagcataatccggttcttacgacagaagaaatgcgtcggatcgttgcagttttccggtttttgcttccggatgcatggattcgccttgcaggtggaagagggcttctcccggataaaggaagatcctgctttacatccggggcaaatgctgcaatttcaggagacatgctgacaactgcgggaatcaccattgagcgggatatgcagatgttaggagaactcggctacattgtgaaataaagaaactttggaaatagaggaaaagtggaagtgaatttcatttttttctctatttttctttacaagcaaatattttttgttataataagttagccaaaactaataaaagttaaatgaaagtaatttcaaggagatgaaaaatgtttgtattgggtaaagtattaagtacaacagcagttttactgtgcatattgtgtctggcagctccgctgaaaaaaacaaaggcagggcagaaaataaaaggacttcggatactgctgaagccgcatgtgttatatggctggttgctgcttgttataggacttatgcatgggattatggcaggtaagaacccggggatgatcagtggcaagctggtatggatggtattgcttgttctgcttcttgtggcctgcctgaaaagccggatgaaaaaatctgtctggatgtttctgcacagatccttatctgttgtttttgcagcaggaatcgtatttcatattgcgtatgcagtgatattctaaaactgcagtttttgtttcctccttgtaaatctttctgactgacgttatactcagaacagaaagtattttcactagaggaaggactaaagagagaatgacgatcaaacagaaaaaaacaattgcaatagcagcaaccggcgggaccatagccggaaccggagaagcgggaaagacggcagtctatcatgcgggagagatgaatgtggagtcgattctggagacaatcccgatgattcagaatgttgcagatattgagacggtacagttgtttaatgtggacagcaatgagatggatgaagagaagtggatcacgctggcgaatcagctcaatgagctggcagcccgtccggatatcgatggaattgtggtcacacatggaacagataccctggatgagaccgcatattttttaaatctgacagtatatacacagaagcccgtagtacttacaggagcaatgcgtccggccacagccaccagtgcagacggaccgtttaatctgtatcaggcagtctgtctggcggccagcgatgatgccagaggacagggtgtgatggctgtgttttccaacacaatctattcaggaagagatattcagaaagtaaataattacaagacagatgcatttgatcagaacgcattcggctgcctgggatatatgcaggatgagactgcgtatttcttttccagaagctttaagacacataccatgcagtctatttttgctctgcgcaggctggaaagtctggcgaaagtagccgtggtttatttttatgcaggcgcagatgagaaaatcctggattatctggcagagacccatgaagggattgtgatcgtaggatccggcagcggtaattataaccgaaaatggatgaaaactatggagaaactggcagaaaaaggaacagtgtttgtcagggcatccagagtgtcacagggaattgtatttgatgacagagtgtttgatccgatggatgtctgcattggagcgaatacgttgtccgggcagaaagcgagagttcttttgatgcttgcactgacgatcacaaaagatgtgaaacagatccgcaatattttcaatcaatattagaatggatgcggcgtatagattgacaaaagtatggtttgtattataatagataatacaaaccatacttttttaatgaaacggaggaacgtaaaatgtggatcgtaatctttttaggaggcgcattgctcacaggctatgcgctgtaccgtcaggcagtcagagaatcgggcagcagatttcagtgtcgtcactgcggacatacgtttcggacagagtggaaaaatctgtttcttgccacacacagctggggagaatataaattaaagtgtccgaactgtggtgccgcggattattgtgcaaatctggataaaaagaagaaaaaataaaaagaaagaagggggactacagggatgttgattcgattggatatggcaagtgctactccgatttatgtgcagctgcgcaatcagattgtgatgggaatcggcacgggtgcattgaaggtcggggaaaagcttccgactgtccggcagatggcggcagatgcgggagtcaacaccatgacggtaaataaaacctatcagctgttgaaggcggaagggtttattgagattgacagaagaagaggtgcagttgtgaatccggtggaggatacggcgggagttttccgggaaaaactggaaggagagcttgcacttctgggtgcagaggcaaaaataaagggaatgaacgagcaggagtttctgcagctgtgtgagacaatttttgagagtttatccgggcagaccggaagcctccggtttggataaggggaaggacggtgcatgatgtatgggatatgagattatgatgtgtgtgatggctctgtttgtgaatctcttggtcgtgggatgttttgcgctggtttacggaacaaagatgaagtatgaaaacggtatgctttttgggatccatatgccaaaagaagcacagaaggatccggaagtgaagatattgatggagcgctataccatccggatgaaacagatttactggtggaatgtggcaggtgccgtactgtcaggtctgctggcatttagctatacttccatctttatgtttggatggatgttctggatttttgaatttacaatcggaagtatgggggttctctgtatgaatcatcggaagctttatgacatcaaagtaaagcatcagtggtttgcagcagaaggtgcggacatcgttgtgatcgataccggagcaagtgcaaaggcagaggagaagcggattccggcagtctggcatctgcctgcagttgtgatcctggcatggctttgctttttgccggggatgcgaagatgggtacaggaagaggcagcaaatatactggttccgggaatggcactgctgacggcaggtttattctgggtattgcacatctggaccaatcgcagacggtgtgagccatacagtgaaaatacgcagatcaatacagcgatccatgtcagggagagaagaatgtgggcatggatctggcttgtgggaacatatacaagtctgatcggtatgggagaagttctctggcagatttcccgtaaaggatatctggatgttgtggatacgatcatttgtgtcatattcagtatggcaggcggtctgtttatacttgcggcaatcctgtggatgatgaaaaagcggcaggagcttttgaaaacagaagagccgctttcctatgtggatgatgatatttactggaaaaatggctggtataacaatccgcgggacagacgctgggtggttcttagcagaatgtgcagttcgaactattcttttaatatgggaaaaccgggtgtacgttatctgacaggagcactggggagtgtgatcgtcatcggcgttttgtggctggttgttgtgtttttcgggatggattttgtccgtccgcagctatctatagatggaaaccaggtgacagtcagaagtgctgaatatgggatttcttttgacagaaaagagatagaagatgcagagcttttggaaaacttgccggaagaagattttgtgaggattaacggactttctgacagccgtcagcttcttggaaaattcaaaggcgaagagtccggaaaggcgatgttttatatccggcgtggagagacaccggttttaaagatcaaacttccggaatatacagtttttatcaacagtgaagaatcagggaaagtgaaggaatggtacgaggaactttcctcttgatttcatatttttttcgtgatatacttctcctaaaaatttgaagtgatttttaggaggagtattttttatggacgcagaccctgcagggaacaagattatttttgacttatgtatcttattatttttcacattgatgaatgcttttttcgccggagcagagatggcagttgtttccgtgaatcacaaccggatccgcagtcttgccgcagagggcaataaaaaagcagtcgttatccaaggtcttttcgaagattccacgaagtttctttcaacgattcaggtagcaattacatttgccggattctattccagtgcttcagcggcgtcgagcatttcaccggtattgagtgcatggatggaacaaagaggaattccatatagtacagcgattgcgtcaaatggagtgacgcttgttttgatgttttttaatctggtattcggagaacttgtgccaaagaggatcgcgctgcagaaggcagaacagttttgtatgatcacagtgatgccgatccattatatttctaagattttgtctccgtttatcaaactgctttctatctcgacaaagggagtgttaaaattgctccgcatgaagacggaagatcaggaagagatcgttacagaggaagaaatcaaagcaatgctgaagatgggagcagaatccggtacggtcgaagacagcgagcgggaaatgatcaactcggtattttctttcggcgataagagcgcaagagagttgatggtgccgagaagagaagtgtttgctgtggatattgaggatccggatgaggagattctggatgcagttctggaatccagacattcgagaattccggtttatgaagaaactgtggacaatattatcggaattcttcatgccaaagatgtgatgatcgaaatgcggaaaaaaacgaccagagaaattgagatccgcgggcttttgagagaagtgttttttgtgccggatacaaaagatgccgatgatctgtttcgggaacttcaggcatccagaaggcatatggcggtgttggtggatgagtatggcggattctccggaatcattacagtagaggatctggtggaggcaatcatgggagatattcatgaagaagatgaagtcgaagaaccggaaatccaacagctttcggatgaagagtacctggtggacggaggcatcctgctggaagatttgaacgaggagttgccgttgtctctgttctcggaaaactatgacacactgtcgggctacatgattgaaaatctgggatatattccaaaagaaaatgagcaggcctctgttttggaaggtgagtggcagctgcgtgtagaacaggtgaaagataaccgcattgcgagggtacatgttgccaggcgcctggggcatgtatcagaaaagtaataagtaattattaggaaaagtaagtaacagatgctctggaaaaggtggatttatattgaattctaataaattcaaagttataataaggctgtatttataaatagaattcgtaatcaaaggagaccatctatatgaaaatgttatcaatcgagcaggaattgaaaaataattcttatccgggaagaggaatcatccttggaaaaagcgaagatggaacaaaagcggttgccgcttattttatcatgggaagaagcgaaaacagccgcaatcgtgttttcgtagaagaaggacagggaatccgcacacaggcatttgatccttccaagctgacagatccgagcctgatcatttatgcaccggttcgtgtactgggcaataagacgatcgtgacaaacggagatcagacagatacaatctacgagggcatggacaagcagatgacatttgaacagtctctcagaagcagagagtttgagccggatggtccgaactatacacctcgtatttccggaattatgcatcttgagaatggaacatacaactatgcaatgtccatcttaaagagcaataacggaaatccggatgcctgcaaccgttacacatttgcatacgagaacccggttgccggagaaggacactttattcatacatatatgcatgacggcaatccgcttccgagttttgaaggagagccaaaactgatttctgtaccgaacagaatcgaagaatttacagatcttctgtggaacagtctgaatgaagagaacaaggtttctctgttcgttcgctatatcgatattgcaactggggatatcgagacaaagattgtgaataaaaatcaataattacagatagagtgtggataaaggagaagaaaatgaaagaattagaattaaaatatggatgtaacccgaaccagaaaccggcaaagatcgcagtcaatgatggaagagaccttccgatcgaggttctctgcggaagaccgggatatatcaactttatggacgcatttaacggatggcagctggtatccgaattgaaaaaagcaaccggacttccggcagccacttctttcaagcacgtatccccggcaggggcagcagtaggacttcctttgagcgatacccttgcaaagatctactgggtggatgatctgggagaactttctcctctggcatgtgcttacgcaagagcaagaggtgcagacagaatgtcttctttcggagatttcattgcactttccgacgtatgcgatgtctctacagcaaaattgatcaaaagagaggtatcagacggcgtgatcgcaccgggatatgagccggaggcgctggagatcctcaaagagaagaaaaaaggaaactacaatgtgatccagatcgatccagactatgttccggctccgatcgagcacaaagatgtatttggcattcagtttgagcagggacgaaacgagctggtgatcgatgacgcgctgtttgcaaatgttgtgacagagaacaaagagattccggaagctgccaaaagagatctggcgatttctatgatcactttgaaatatacacagtccaattctgtgtgctacgtaaaagacggacaggccatcggaatcggagcaggacagcagtccagaatccactgtacacgactggcaggaacaaaagcggacaactggtttctgcgtcagagcccgcaggtattggggctgcagtttgtagacgaaatcaaacgtgcggatagagacaacgcaatcgatttgtacattggagaagattacatggatgttctggcagacggagcatgggagaatatcttcaaagtaaaaccggaagtatttacaagagaagaaaaaagagcatggctggatcagatgacagacgtggcacttggatccgatgcattcttcccatttggagataatatcgagcgcgcgcacagaagcggtgtgaagtatatcgcacagccgggcggttctgtaagagatgacaatgtgatcgaaacatgtaataaatacaaaatggcaatggcatttacaggaattcgtttattccatcactaaaatgtggtaaaatccgtatgacggggaaatttcaagtacccggcatacggattttttgtataagaaatgatagaagataaatgatgtctgatggagggaagaagcgatgataatagaaacaagaagcgcacaggagacatttcagcttggaaaagaactgggcgagaaggcatatcctggacaggtgtttacgctgaccggagatcttggtgttgggaaaaccgtgtttacgcagggctttgcagccggtcttggaattacagagccggttaatagtccgacatttacgatcgtacaggtgtatgaggaaggcagactgccattttatcattttgacgtatatcgcattggagatgtggaagaaatggatgaagtgggattcgaagattatgtgatgggggaaggagtttccctgatcgaatgggcaaacttaattgaggagatacttccccaaaaacggacggagatcaccatcgagaagaatctggaagaaggatttgattaccggaaaattactgtggaggaaacgatttaggcaaatctgtttgcacaatttcggaaaacacggtaacatagaagcgataagaaaaaaaagagaggaaatagagtatgcgggtattggcaatagacagttccgggctgactgcgactgttgcggttgtagaagacactcagactgttgcagaatatacgatcaattataaaaagacacattcacagaccttacttcccatgatcgatgaagtggtgaagatgacagagttggatttgaataccattgatgccattgcggtggcagggggaccgggatcctttactgggcttcgcattggatctgcgacggcaaaaggtctggggtttgcgttgaacaaacctctgattcatgtgccgacagtggacggactggcttataatgtatatggatgtgaggatatcatctgtccgatcatggatgcaagacgcaatcaggtgtatacagggatttatacattttcaaaaaaggcgggaacaaaagaggggagcaatctggtagaaccggtctttcaggtgatcaagatgcagatggcggtttcgatcgaagaactggcagagcgtttgaaccgttaccgccgtcctgttgtatttttaggagacggcgtaccggtttatgagaatattctggcagaaaagctgacggttccgtattcttttgcacctgcgtatatgaaccggcagagagcagccgttgtgggaacgcttggaatccagtattacaaagcgggaaaatttgaaacagcagaggagcatcgtccggattatctgcgtgtttctcaggcagagcgggaacgcgctcagcgtgagaaagaagcagagattatagtacgagagttgaaagtggaagattctgcggcagttgcggagatggagcagcagattttttcggatccatggagtgaaaaaagtgtgatggagactgtgcagcagaaacagtctgtttgctttgcggcggaaaaagctggacatcttctgggatatctgcttgcatatcatgcggcggacgaagcggagatcgcaagaattgcggtgcagaaagaagcacgcagacaaggggctgccggtaaactgatgcaggcgcttgaacactattgtgaagaacacaagatggaaaaacttcttctggatgtgagggagagtaacgaggcggcgcgcagcttctatacgaaaaacggattcgtggaggatggcattcgacagggattttatacaaacccgtctgaagatgcggttttgatgagcagacagcttggtgcagatgtctgatggatttcaaaagaatgcttatagaatcactggaagtgccggaagcagttcccagtaggaattgcggcgatatccggctataatgtaggcgtagcaaaaagaaaatccgaacatcacaggaggaaattttatgcgccagtatgaattaaaagaacaaaaagaaatcagcaaaatgatttgtaatcaatgtggaaaagaaattccggtatccggcggacatgagatggaaggggtgttccgtgtggattatgaatgggggtatttctctgaaaaagacggggaaaggcactcctttgatctgtgcgaagcgtgttatgataagttgcttcgatcttttcagataccggtggaaatagagggataatatgttagatgtatgtttgcttggaagcggcgggatgatgccgcttccttatcgctggctgacggcgctgatgacacggttcaacggcagcagcctgctgatcgactgcggggaaggtacgcagattgcgatcaaagaaaaaggatggagttttaagcccatcgatgtgatctgttttacgcattatcatggagatcatatcagcggtcttccggggcttcttctcaccatgggaaatgcagaccggaaagaaccactgactttgatcggacccaaagggctggaacgtgtggtatctgcgctccgcgtgatcgcaccggaattgccgtttccgatcatttacaaagaaatcgagggggcagagcagactttcgaattaaacggatatcgcctgaaagcatttcgggtgaaccataacgttctctgctatggttatacaatggagatcgaccgtgccgggaaatttgatgtagagagagcaagagcccgggaaatcccgcagcagtactggaaacatctgcaaaaaggtgaaacgatcgagaccgaagcaggaatcctgactccggatatggtgcttggaccgccgagaaaaggcttaaagcttacctatacaaccgataccagaccgacgaactctatcagggaaaatgcgaaggattctgacttgtttatctgcgaagggatgtatggagaaaaagaaaaagcagccaaagcagtggaatataagcatatgacattttacgaagcggcacatctggcaaaggacgcacaggtgaaagaaatgtggctgacccattacagtccgtccctgacaaggccggaagaatatatggatgaagtacgccggatctttccggaagccaaggcgggaaaagacagaatgtccagagaactggcatttgagtagaaagaggtttgcagtatgaaagaaatcagagatatcaatatattagcgatcgagagttcctgtgatgagacagcggcagcagtgatccacaacggaagagaagtgcgctccaatgttatttcttcccagattgaactgcacaaattgtacgggggcgttgtgcctgagattgcatccagaaagcatattgaaaaaatcaaccaggtgatagaggaagctttaaacgaggcaaacgtgacattggacgatatcgatgccatcggggttacttacggtcctggacttgttggggctcttctggtcggtgtggcagaggcaaaagcaattgcctatgccaaaaatcttccgttggtaggggtgcatcatatcgaggggcacatttctgccaattacattgaaaatccggatctggagccgccatttttatgtcttgtggtatccggtggacatacccatctggtctgtgtgaaagaatatggaaaatatgaaatactgggacgtacccgtgatgatgcggcgggagaagcctacgataaagtggcgagagcaatcggacttggttatccgggcgggcctaaaatcgaccggatcgcaaaagaaggaaatccggatgccattcagttcccaaaggcccatatggattcagaatatgattttagcttcagcggtctgaaatcttcagtattgaattatatcaatggatgcaagatgaaaggagagtcctataatccggcagatattgcggcatccttccagaaagcggttgtggaagttttggtagaaaactccatgcatgcagtagaaaaatatggaatgaacaagtttgcgattgcaggcggtgtggcatccaacagcgcccttcgccaggcaatgcaggaggcttgcgaaaaacgtggtgtgaaattttatcacccgtcaccgattttttgtacagataatgcagctatgatcggagtggctgcatattatgaatatctggcaggaacaaggcacgggctggatctaaacgcagttccgaatctgaaactcggagaaagataaaggatatgaaagaaaaagaatttgtaacagcaatcgttctggcagcaggcagaggaacgcggatggggaccaaaatacaaaaacagtatctggatctgtgtggaaaaccggtcctctattattccctgcacgcatttcaggaatctcctcttattgacgaaatcctgttagtgacaggagaacaggaaatcgaatactgccggaaagagattgtagaaaaatatcagcttacaaaagtaagaaaaatacttgccggaggggcagagcgttatctttctgtctggaatggaatccaggcagcagaaaataaaggctgtctcttcattcacgatggcgccaggccgtttgtagatgaggagatgatagagcgtgtgtatgagcaggtacagaaagaaaaagcatgtgtagttggtatgccggtcaaagacaccatcaaaatcgcggatgaaaaagagtacgttcagacaacaccggacagaagcacagtgtggatgatacagaccccgcaggtattttcttacgatatcgtaaaaggagcttacgagatgctgatgcgggaacaacagatttccgtgacagacgatgccatggtcgtggaacagatgctgaatcatcccatccgtctggtgtatggttcgtatgaaaatatcaagatcacaacaccggaagatctggagatggcggaagtgtttttgaaaagacgaaaaaagtaaatgatgtatgcaagaggctgggagtttccggcctttttcttttggcaaaatgaaacttttgaccgaaaagaactgtatgtatagatagaaaggggggtatgcaagatggtaaaaaagagattgatacttcaactgcaacaaaaagaaattgccgcattagaagaaattatccaaacgtatcataattatgtagcaaaaattgtatattcgattctttctttttattcgacagaaatagatatacaggcagtgatcaatcaggtgtttttttgctttgggaaaaggcagaacagatagatacaaataaatgtgaagacattaagtgctatctggctgcgattgccaaacatgaggcaatcaatgaaagaaacaaaattcgtccgcatgttgaattggatgaaaatgtgattggaaacagtgcaaaagtatttgcagatattgagttacgagaggtaatatattctgcacttcaacagttgaaaacagaatatcagattatattgttgaaatattattatcaggaaaagttgattcgggaaattgcatcagaagagggaatcccagagtctacagtaaaaacaaaattaaaaagaggcagggaaaagctgaaggaaatcttgataaaggagtgcgtcattgatgaaaatgaattatagtgatatgtttgactgtatttctgataaaagtgctgaaattttgaatgaatatgaagaatacgagctagatactgttttttctgcagttaatactgaaaaagtggtaatttctaagattatgaatagagtaccttcggtaaaaaagaaaagtctggaaatggcgaatattacttgcagcggcaatgatattatcagcttcatcaattgtatttgcagtgaaatattggcagtttccaaatgatggaggaacacagctggtaacggaggaaaatcgtgaattgataggagaaagcatacaaggaacagcattggtttatgattcggaaggaaatcttataaacaaagaagatgcggaaagtgtatcagggctctatgattgggaaaattgtccaatgattcaacaaatagaggatgaaactgcaattccgagtacatttacagtaatcccagtgaaaaaaagaggtacacaatatcaaatcccagaagtgatgtttaccagtgaagcgcttgtgatttttacaaaggaagacggaagtggatgggaattaagcgaaggtgatgagattcaaattcatctggaagaatacgaaacaaaggattttcgggtagaaggacaaatgatcggatacaaattgatccataacggagaattaaaaaaagcagaagatgtacgagaaggactcagacaaaattgcatactgtctgcaactgaaaaaggggagtattatccatgtttgatcggcagaagctctgatattacaacgctgaaaaatggaactattacagttatcgaaaaatagaagtgaatatatagcggcagccataataaagaaagatgcaatcagctgccgcgacattgattattcctgttccaattgtgtttgtgtaagcgctatatttgcgcagtgtcatttcttaattgtaggcagaaattatttgtgcagagatagttacgaaagaagagttaatggccatcgcacaaaaaaataaaaaaagtgaaaaaaaggtgttgacatttcagatagtattatgctagaatacacattgtcgcgagggcgaacaagacaatttaacctgtgaaatgacaggaagtttggagaggtatcgaagtggtcataacgaggcggtcttgaaaaccgtttgtccgagagggcgcgtgggttcgaatcccaccctctccgcttgggaagttcagaattgaatggacttccttttgttttccttgaaggtgcgcatgcacaactgagaagattgaggcatatgacgacaaacgaggaatgagtgagaaaagtatagcgtgtataatacgcgggcattttggagaagtacccaagctggccgaaggggctcccctggaaagggagtaggtcgttagtagcggcgcgagggttcaaatccctccttctccgttactttctaaacgagaaagtacacattgaaaactctggaagaaaaataaaaaagttcttgacagaaggaagtggatgtgataacctattaaagctgacttgtgagggagaacaacttccggaacagacagcgaaaagaaaaataaaaaagttcttgacaagtgagaaacagcgtgataaaatactaaagctacttcttaacaagaacagcgaagaaccttgataattaaacaatagacaacaaccttgaaaatttcttaagagaagattttttaagaacagcatctaaaagatgcacccgtcacatttaatgtgacagacagtaaaagggatgaattagctagtagttaattctgaccggaacgaacacttttaacgagagtttgatcctggctcaggatgaacgctggcggcgtgcttaacacatgcaagtcgagcgaagcgcttttgcggatttcttcggattgaagcaactgtgactgagcggcggacgggtgagtaacgcgtgggtaacctacctcatacagggggataacagttggaaacggctgctaataccgcataagcgcacagtaccgcatggtaccgtgtgaaaaactccggtggtatgagatggacccgcgtctgattagctagttggtggggtaacggcctaccaaggcgacgatcagtagccgacctgagagggtgaccggccacattgggactgagacacggcccaaactcctacgggaggcagcagtggggaatattgcacaatgggggaaaccctgatgcagcgacgccgcgtgagcgatgaagtatttcggtatgtaaagctctatcagcagggaagaaaatgacggtacctgactaagaagccccggctaactacgtgccagcagccgcggtaatacgtagggggcaagcgttatccggatttactgggtgtaaagggagcgtagacggcatggcaagccagatgtgaaagcccggggctcaaccccgggactgcatttggaactgtcaggctagagtgtcggagaggaaagcggaattcctagtgtagcggtgaaatgcgtagatattaggaggaacaccagtggcgaaggcggctttctggacgatgactgacgttgaggctcgaaagcgtggggagcaaacaggattagataccctggtagtccacgccgtaaacgatgaatactaggtgtcgggtggcaaagccattcggtgccgcagcaaacgcaataagtattccacctggggagtacgttcgcaagaatgaaactcaaaggaattgacggggacccgcacaagcggtggagcatgtggtttaattcgaagcaacgcgaagaaccttacctggtcttgacatccctctgaccactctttaatcggagctttccttcgggacagaggagacaggtggtgcatggttgtcgtcagctcgtgtcgtgagatgttgggttaagtcccgcaacgagcgcaacccctatctttagtagccagcatttaaggtgggcactctagagagactgccagggataacctggaggaaggtggggatgacgtcaaatcatcatgccccttatgaccagggctacacacgtgctacaatggcgtaaacaaagggaagcgagcccgcgagggggagcaaatcccaaaaataacgtctcagttcggattgtagtctgcaactcgactacatgaagctggaatcgctagtaatcgcgaatcagaatgtcgcggtgaatacgttcccgggtcttgtacacaccgcccgtcacaccatgggagtcagtaacgcccgaagtcagtgacccaaccgtaaggagggagctgccgaaggtgggaccgataactggggtgaagtcgtaacaaggtagccgtatcggaaggtgcggctggatcacctcctttctaaggagaaagaagtagaggaagtaagagctattgtttaattatgagggttctcaagaactcagcctttttggtggcgatgcgctcaggggaaacacccgtacccatcccgaacacgatggttaagacctgagcggccgatggtactgcactggagacggtgtgggagagtaggtggccgccaaaacaaaaaaagaaaaagaactggtttcaccagtgattagagattaaaagaggttttagtttctaatgactgatgaaaaaagcagtcagatgtaccttgaaaattgcatacaaagagaaatatcttatgaaaataagagagttgaattaattcaacaagacatccgaggtaatgttaacaacattataaaaaacaaactattaccaacgcatgtaacgctatacatgtgtagataagagaccaacccgtgtttcttgtcagttggttatgctaataagagcgtatggtggatgccttggcactaagagccgatgaaagacgtgataagctgcgaaaagcttcggggaggagcaaatatccattgatccggagatctctgaatggggaaacctacttgagaaaacctcaagtatccacagcccaatccataagctgtggaagggaacccggtgaactgaaacatctaagtagccggaggaagagaaaacaacatgtgattccgtaagtagcggcgagcgaacgcggaagagcccaaaccggagtgcgtgcactccggggttcggactgcagaattgacgagtgagcctagtagaatggttttgggaaagccagccagagagggtgaaagccccgtacacgaaaggcaagcaagcatggcaggatccagagtaccacgagacacgtgaaaccttgtgggaacgcgcggggaccaccccgtaaggctaaatactccttagtgaccgatagcgcatagtactgtgaaggaaaggtgaaaaggaccccgggaggggagtgaaagagaacctgaaaccatatgtttacaagctgtggaacatctttatatgatgaaccgcgtactttttgtagaacggtccggcgagttacgctggctggcgaggttaagggctgaaggcctggagccgaagggaaaccaagtctgaacagggcgaaatagtcagtcggagtagacccgaaaccgggtgatctatccatgtccaggttgaagttgccgtaaaaggcaatggaggaccgaacccacatccgttgaaaagggtggggatgaggtgtggataggggagaaattccaatcgaacccggagatagctggttctcctcgaaatagctttagggctagcctcatgcaagtcttacggaggtagagcactgaattcctaagggggcgtcaaagcttaccaagggatatcaaactccgaatgccgtgtagatggtgcatgggagtcagactatccgagataagttgggtagtcaaaagggaaagagcccagacctacagctaaggtcccaaaatgtgtgttaagtggaaaaggatgtgggatttcgaagacaactaggatgttggcttagaagcagccatccattaaaagagtgcgtaatagctcactagtcgagaggtcctgcgccgaaaatgtccggggctgaaacacactaccgaagcttaggaattgatgaatgtcaattggtagaggagcattcttaccgagacgaagctgtaccggaaggagcagtggattggtaagaagagagaatgccggaatgagtagcgagaggaaggtgagaatccttccggccgaatatctaaggtttccagagtaaagctgatctgctctgggtaagtcggggcctaaggcgaggtcgaaagacgtagtcgatggataacaggtaaagattcctgtactatatcataacagaactgtggggacgcagacagagagcataagccgggaatggaaaaaccggtacaagcgaggtaggagtgcatcaggcaaatccggtgtacaatctgaagacgtgatgtggggcgtaaagccggaagtatgtgagctggctgccaagaaaagccgctattgtttatgatatacccgtaccgtaaaccgacacaggtggatgaggagagaatcctaaggccgacgggagaagcattgttaaggaactcggcaaaatgactccgtaacttcgggagaaggagtgccatgtaaaagtggccgcagagaattggcccaagcaactgtttagcaaaaacacaggtctatgcaaaaccgaaaggtgaggtatatgggctgacgcctgcccggtgctggaaggttaaggggagaggttagccgtaaggcgaagctttgaacttaagccccagtaaacggcggccgtaactataacggtcctaaggtagcgaaattccttgtcgggtaagttccgacccgcacgaaaggcgtaatgatttgggcactgtctcaacaatgcacccggtgaaattgaaataccagtgaagatgctggttacctgcgccaggacggaaagaccccatggagctttactctagcttgatactgggattcgatattgcatgtacaggataggtgggagactgagaactgatgacgccagttgtcagggagtcactgttgggataccacccttgtagtattggatttctaaccagcagccgtgaaccggctgggggacaatgtcaggtggggagtttgactggggcggtcgcctccgaaagggtatcggaggcgctcaaaggttccctcagaatggttggaaaccattcgaagagtgcaaaggcagaagggagcttgactgcgacaccgacgggtggagcaggtacgaaagtaggacttagtgatccggtggtataaagtgggattgccatcgctcaacggataaaagctaccctggggataacaggcttatcactcccaagagttcacatcgacggagtggtttggcacctcgatgtcggctcatcgcatcctggggctgaagtaggtcccaagggttgggctgttcgcccattaaagcggtacgcgagctgggttcagaacgtcgtgagacagttcggtccctatccggcgtgggcgtaggatatttgagaggagctgcccttagtacgagaggaccggggtggactggccgctggtggatctgttgtattaccaaatgcatagcagagtagccaagccgggacgggataaacgctgaaggcatctaagcgtgaagcccccctcaagatgagatatcccataacgtcaagttagtaagaccccttgaagacgacgaggtagatagggcagaggtggaagtgtggtaacacatggagctgactgttactaataggtcgagggcataaccaagcaaggtgataggaaaaggatgattctttgtatgcagttttgaaggtatacttcaatatttaatattcctcgatagctcagtggtagagcattcggctgttaaccgaagggtcgttggttcgaacccaactcggggagctaagagcttcaagagaggctcttttttaatgattggtatgagggcttatagctcagccggttagagcgcacgcctgataagcgtgaggtcggtggttcgagtccacttaagcccatacttttgaaaaaaagtaaaaaaatacttgcaaaaatgaaagacatatgatattattcttatgttgagtcgctactaaatgcgatgtaatgaggctccatggtcaagcggttaagacatcgccctttcacggcggtaacacgggttcgattcccgttggagtcatttcaagttgatttgatataggttaaggcattatgccgatgtggctcaattggcagagcagctgatttgtaatcagcaggttatcggttcgagtccgatcatcggctttgttcctttagcgggacattatagagtgtggacctttagctcagctggttagagcaatcggctcataaccgatcggtcccgggttcgagtccctgaaggtccactaaaaaaataatgaataaggcccagtggctcagttggttagagcgccgccctgtcacggcggaggtcgagagttcgagtctcttctgggtcgtttttaaagaaaagaagattgtatattctgggatcttagctcagctgggagagcatctgccttacaagcagagggtcacaggttcgagccctgtaggtcccatttcataaagccagtaatgccggcgtggcggaactggcagacgcacaggacttaaaatcctgcgggacttatactcccgtaccggttcgattccggtcgccggcattactgactttatgagaagaaagatatcgcagaattgttgaggtaaacagttctgcgatatttttatttataagaaatgatcttttatatggcaagataacttattttgcaacaataaatccccgtcaagatttcggagttatgaagatccagtatcttgacagggattctcttatcaatgtgtattattcctcttattcaatcgcatctgtttcaatgacgaattttacatttccttccatatcttttgcctttccactgaaggtgtcatagctgcactgagcagaggtcagggcttctaatcggtctagaatattgcctaattccttttcaacagtatctttcagtttacgggtaccttgctcatcaaattcctgcattccatctttcaatgtgtgggcgccatcctgaagttgtgtgattccgtcttttacctgattacttccatttagcaatgtggttccgcctttggaaagctctgttgttccggaaaggagtgtggaagcaccgtctcgaagtgcagcgctgtttgccgccagcgctccggaaccgtcagaaagttgggtagcaagtgtgttgagtccggaggcaagttcgtccgtaccgccagccagagtattgataccggcaaccagagaaggactgtttgcttttaatttggatgctccgttgagtaatgtctgattgtatccatccagttgttgaaatccaccgaggagagcgttgatgccgtttactgcagatggaagagaatcagtggatttgtccagaagtcccatgtttttggatacggtggtcagtccttgatccagagctttcataccagcattgattttgtctacattgtcttttaactgagacattgcattttccggaagtttgatgttagagagctgatctagttgcttttggatctccggaagttttgcagacagcttagtgaaagaggattcaatgccttgataagcagtggaaatctgtgttattgtctgcgtcagtgcattggtatccagtgttgggagctgggcactgccttcgtttgtaacagaggcaagaggttgcagagagctgctcaaatttcctgtctgagtttgcgcttctgtcagtgttgcgatggaagcttgaagctgagaggcaagttctgtgttaccggaagcatttgcctgagcaagttgtgcgttgagagcgtcaatcgaagtttgaagctgagcacttgcatttgcggcagtggagcttacagattcaatctgtgcatttctttcactaatctgtgtgttgatattagtgacaacggcagtgcagctgcctttgaatgtggaaactgcctgattgatttcctgtaactgcgtgatgagctgctgcattccggttatcagctgctgtgcaggctgctggatttcttgttttagctcggaagaaagtgtggtgacttctgtaagcagcgtttgacctgaggaaatcatagaatctacctggtttaaaagaggctgcatattatttagtgcgtcagcaagctgcccggtagcttcggagagttttgtagatgcagctttgatatcttcttcgctggaaccttttccgtcgagtacagaatttaattgtgtgatggcagattttacttgagtcagtccatcgccaagttcagataattgtgcggcaccttcggagagctgttgttcgcctttaatataggaagtgatcccgccacagagctggtctgtaccttccgtataggattttgcaccgagaacaaaagtgttgacaccatttacatattctgttacttttccggtcaggactccattagagccgagataagtctgaatcccatcattgagctgatcagccccggtggtatagctgttgattccatcggacagagcgccagctccttcctgcagtgcgtcgataccggtctttaaagtctggataccggcatcaaattcaccgtagctgcttccaagggtatctgcaccttctgaaagctgtgaggaaccatcaacgagctgcatagcagcatcttccagttcatcaagagaggatttcaaagaatccatatcggagatgtccttgagattgagctgatcgaacaggtcagagagtcccactgtgaaggtagaggacatacggaaatctgttacgtcagcagaaatttccagactttccggaagtgtgatggaagtgtcttcgttgattccaagactttctttgagtccaggagttgtaaatccaagtacgatattccgatttccgtcggagatgacctttccgttatcgatcattacattggaaaatgtttcggtaggaagaatcagtccggtgagcatgacaaaaggggagaatacttcttctgatttgccatcaatgctgactgtctttttttcatgattggtataatcaattttaatctgtaaatgtccgctctttcctttcagatcctgagggaagatttcttttccatccagaatataggtcagtttgacagacacagggagatctttatccgttgttccctggtagtaaatatcttttccatcggtatcccatgtcagtgtatccccggtttctgtgaacgtttctgttcctttgatattcttgattccctccagagtgctttcatccgctacggtatcttcaagacctgcatttttcagccagttggagacagtgacctgtttctggcttccggtggcatcggcattgacatagacagtttcatccttggaaacagaagtatcagcggcacagacaggaagtgcacctaaaagaaatgacattccggcagcgattccggctgtgactccacgttttattttgcgatttttattcatttcaataacatcctttctttattttttatgaagaaaaccaatcgaggtcttgcagatcagcttatcaaaaatcataaatgctgcaggcagcaccagaattacgactgccatactgatcagagcccctcttgcgagcagcgtacagatagaactgatcatatcgacctgtgagtaccaggcaacaccgaaggttgcggcaaagaagctaagtccactgctgatgatagaaagcatgctcgttttgtgtgcaatagaaattgcttcttttttgttatgtccgcggctgcgctctttttgataacggctggtcattaagatcgcatagtctaccgttgctccaagctgaatggtaccgattacgatacttgccacaaatggaaggctgatgccctgataaaacgggatcgccatattgacggcaattgcaaattcaatcacagcaaccagaatgaccggaagcgagatagatttgaaaatgagcataatgatcaaaaaaattgccgcaacggaaatcagatttacattgagaaggtcaatatcagtaacatcttgaagatctttcattaaaggggcttctccgatgaccatggcatctttgtcataggattttacgattttatcgattgcagcaatctgtttattaacttttggagttgcggaaccgtattcagaacagacaaacgcaagctcatagttgtcactttgcagcatttttttgatgtcatccggaatcatggaatctggaatggaaggcccgatcagagaattcatattcagactccattttacgccgtcgatcttgtctacttcacttaacatattctgtttttcaaggccatccatgtttttatccatcaggatcatatgcatattgctcatgtcaaaatcttcttccagtttttggtttgccacattgctcggcagagagtccggaagcgattctgcgatattgtagtagatttccgtgtgactatttccgtaaattgcagggaggagcaggattaaaaatgctgccagccatactttatagtgttttgtaatgaagtttgaaggcttctccacgtttttgaaaagtggtttgtgctttgttttttcgatcggtttatcaaaaacaagaatcagagcaggtaaaatggtgacacagcagatcacaccgatgatgacgccttttcccataacgattccaagatcccggccaagcgcaaaggtcatgatacaaagcgcagagaatccggctaccgtagtgacagagcttcctacaacggatttgaatgtgttcgcaatggcgtgccccatggcgcgttccttttcccccgggaaacggagtttattttcttcatagctgttcagcaggaagatggaatagtccatcgtaaccccgagctggagaattgcggtcagtgcttttgtaatatacgaaatttcaccgaggaaaatgttgcttcccagattgtagagtatagcgactccgatgctgaacaaaaacagaatcggaaccaggaacgattgtgaagtcagctccagaaccaaaaagcacatcataacagcaatcacaatgtaaatcggaagttcctgaagactgatgttttttatgtctgtgacaacaccggtcattccactgataaagcattgtttatctgtaatttcacgcatctgggagactgcattcatcgcttcatcggaagaagtggtgttatcgaaaagtgccagcatcattgtggcatctccgttaaaaaaagcttttcttaaatcagaaggaagcatttctacagggagagtaatgtcagcagcatcatcgtaccagagaacatctttgacgtgtggtactttgctgaattgttcttccaatttctgtacatctttgagttccatatcttccacaacaaccatggaaaatgctcccatgccgtattcgtctaccagaatatcctgtcctttgacagtctccagatgttccggaagataacttagtaaatcataattgatttttgtttttgccattccaaaaaatgatggaatcagcagcagaattccgatcagcagaatcaaaatcctgtgcctggcaatccatttgccagttttgaccaatgatatcatcccctatctttttttctatacttcacattatagtataaaatgactaatagtcaataatatgacaacaaaaaatgaaaaaaagtcattttttattgactttctaaaaaatttgcctgataattaaggatgcagttgcagggatactgcaaaagtcaggaaataccagggggaatgaaaatgggaaaggtagaaaccaataagaaacgaaagaagaatgcactgtttcagacggcgtatgaattgtttacggataaaggttttgcaaagacaaccatatccgatattgtaaataaggcaggtcttgcaaaaggaacattctatttatatttcaaggacaagtacgatctgcgggacaggctgattgcatatcaggcaggaaagctgtttgaagatgcacataaagaactggacaagaaggaaatcaacagctttgaggaagaggttctgtttttgacagattacattattggaagatttgaaaaacagcattcgctgatgcaatttattgcaaagaacctgtcctggggcatttttaaaaacgcgttttccagtacagagtttccggaggcacagggattttacgaacattatctggaggcattaaacaaatttaatgtgaaatgtgaagagccggagttgttgttgtttacgattatagagctgctcggttctacaagttataactgtattctttataagcagccggtcacgatgcaggaatatctgccgcatctgcaccggattttacatcagcttttaattgcatttacagaagaagcataacagaacaacagatataaagaaagatcctgcagtcagttcaggatctttttcatatcatcgggaagaggagcagtgaaatccattttctgcccggtgataggatggagaaatgtcagacgataggagtgcagagcctgccgggtgatgtgttccatatcagggttgtacagatagtctccgatcagaggaaaaccgatgtatttcatatgaatccggatctgatgggttcgtccggttcccagccggagtgagacaaggctgtgaccgtttttctcttccagaaactgatagtaggtgactgctttttctccgtggtcaaaatctacggtacgctcaatgatggaactgtcttttctgccaagcggagcggtaatgacaccggattccggagtgagatgtccgcgcacgatggcacggtactcccggtgaatttcccgtcttgcattcatggaggacaggatcgcggcgctgactacatgtttggcaatgatggtcagtcctgaagtatcacggtccagccggttcacacagcggaagataaagggtttcttctgctgctcaaaataccaggcgagtgcatttgccagagaattgtagtagttgttcaaagaggggtggatcggcatcccggcctgcttgtcgatgacgagaatatcttcatcctcatagacaatatggatgggatgttctaccggaggaacccgttctgaagattgctcttctacaatccggatcaccaactcatctccggatgtcaggcggtgtgtcatgtgaacccatataccatttaacaggacactttctggtgtcttttttaaatgggtaatgtttttggcggaatatccgcggtgtcttaagttttgctcaatggtaaatccggcatctttgtcggaaatcaaatatgtgatcgttcggttcataaagattctcacattcttttgttttttcttttatgatagcagagaacagaagaagcgtaaatattttttatggtttccaaatacagacctgtgttataatagcaccagttattctatttttcatgagggcaagggaaaaaataataacagaagtgaggaaaataatatggatatcaatcagaaattgacagaagaactggaagtaaagcgctggcaggtggatgcagcggtaaaattgatcgatgaagggaacacgattccgtttatttcaagatatcgaaaagaagtgacaggctcattaaacgatgagcagcttcgaaagctgcatgagcgtctggtctatctgagaaatctggaggagaaaaaagagcaggttctttccagtattgaagagcagggcaagctgacagaggagcttcgaagtcagattctggcagcagagacgctcgtagtagtagaggatctgtaccgcccgtatcgtccaaagcgaagaacaagagctacgatcgccaaagaaaaaggtctggagcctctggcagcggttatcacactgcagcagctgaagcgaccgcttagagaagaggcagagcagtatctgtcagaagaaaagggtgtgacatccgtggaggatgcgatctcaggagcgaaagatatcattgcagaagctatttctgatgaggcagattacagaagctggatccgtaagattacgatgaaaaagggaaaattgatttccactgcaaaggatccggaggcagaatctgtctatgaaatgtattatgagtttgaggagccattatcaaaacttgcaggacaccgtattcttgcattgaaccgtggggagaaagagaagatcctgacggtcaagattgaagcacccgaggatgagattctcggatatctggaaaagcagaccattcatggaaaaaacggtgctacggagcaggcgctgaaagaagcggtggaagacagctataagcgtctgatcggtccggcgatcgagcgggagatccgcagtgatctgacagaaaaagcagaagacggagccattgaagtcttcggtaaaaatctgcaccagcttctgatgcagcctccaatcaccggtcaggtcgtgctgggatgggacccggcattccgtacaggatgtaagcttgctgtggtagatccgaccggaaaagtattgggaacgactgtcatttatccgactgctccgacgactcctgcaaagatcaaagcatcgaaggatttattgaaaaagattattccgaaatatcacattacattgatttcgcttggaaacggaacagcatccagagagtccgagcagtttattgtagagctgttaaaagagattccggagaaagtgcagtatgtgatcgtcaatgaggcgggagcatccgtgtattcagccagcaaactggcaagtgaagaatttccgaaatttgacgtaggacagagaagcgcggcatccattgcaagacgtctccaggatccccttgcggaactggtcaagatcgaaccgcagtccatcggcgttgggcagtaccagcatgatatgaatcagaaaaagctgggtgaatcactgagcggagttgtggaagactgtgtaaataaggtaggtgttgatctgaataccgcatcagcgcctctgctttcctatatttccgggatttccggtgcaatcgccaaaaacattgtggcatatcgggaggaaaacggaaagttccaggatcggaaagatctgttgaaggtcgcaaagctggggccgaaagcatttgaacaatgtgccggattcatgcgcattcagggcgggaaaaatccgctggatgccacaggggttcatccggagtcttatggagcgacagaaaaactactggagagacagggatttacgctggaggatgtggcaggagggaatctgtccggtctgtccaaaacagttaaagattacaaaaagctgtctcaagagctggaaatcggagaaatcacactccgtgatattgtaaaagagctggaaaaacctgcaagagatccgagagatgagatgccaaaaccgatccttcgtacggatgtgctggatatgaaagatctgaaagaagggatgatcctaaaaggaactgttcgaaatgtcattgattttggagtctttgtggacatcggggtacatcaggatggactggtacacatttcccagattacagacaagtatatcaagcatccgctggaggctgtcagtgtgggagatatcgttgatgtgaaagtgatgagtgtggatctgaagaagaaacgaattcagctgaccatgcgtggaatttcttaaaaaggcgggagttgacgtttaagaattgcaatttgcagaataatcccatataatggaacagaaactgagtatacccgaatctcgggatgctacaaaacaggaaaagggggatttttatgctgaaaggcaaaacagtagtacttgcggtgtccggaagtattgctgcgtacaagatcgcatcgcttgccagtgcactgaaaaagctgcatgccaatgtgcaggtactgatgaccaaaaacgcggttaattttatcaatccgatcacatttgagtctttgacagggaacaaatgtctggtggatacgtttgaccggaattttcagtacagtgtagagcacgtggcacttgccaagcaggcggatgtggttttagtggcaccggccagtgccaatgtgatcggaaagatcgcgcacgggatcgcagatgatatgctgacgacgacagttatggcatgtaagtgtaaaaagatcattgcaccggcaatgaacacaaacatgttcgataatccgatcctgcaggacaatcttaaaattctggaacactatggatatgaggtgatcagtccggcagtgggatacctcgcatgcggggataccggagccgggaagatgcccgagccggagctgctgttacagtacattttaagagaaatcgcatatgaaaaagatatgcagggtaaacgggtgctggtgacggcaggtccgacacaggaatcgatcgatccggtcagatttattaccaatcattccaccggaaagatgggatatgcgattgcaaaaatgtgtatgctgcgcggagcagaggtgacgctggtaagtggtccgacatccattgcaaaaccggaatttgttcacgtggtggacgtggtaacagcaaaagagatgtacgaagaggtcacaaagagggccaaagatcaggacattatcatcaaagcagctgcagtggcagattaccggccaaaatcagtgagcagtgaaaagatgaaaaagaaggacgatgatctggcgattccaatggagcgtacagatgatatcctgaagtttctgggagagcataaaaaagagcatcagtttttatgcggtttttccatggagacggagaatatgctggagaattccagaaaaaaactggaaaagaagcatcttgacatgatcgtggcaaacaatctgaaggtagaaggggcaggatttgccggagataccaatgtggtgacgatcattaccgggcaggaggaagtttcactcggaaaaatgacgaaagaggagacagccttaaggatcctggacgaaattttaaaagcaacaaattaatatggagacagaataaaaattctgtgccaatcagtattgtatctcgaaagagaatgataacaaggaggcaatttatgaatcagacaacaaacaaaacacagacaacaggcagcagtgtgcgcacacggcatatggtacagacggcaatttttggagttattattgtaatcatggcgttcaccccttttctcggatatatcccgctgggatttacaagagcaacgattatccatattccggtgattctggcatcccttttgatgggaccaaagacgggagctctgctgggactgctgtttggactgaccagctttattaataatacagtgaatccgaccgtgacttcttttgtatttaccccattttacagtatgggagaattcagcggagggatcggaagcgtgatcatctgttttgttccgcgtattctgacaggagtcgttccgcattatatttacaaattggtgaaaaaatgcagcaaatcaacaggtgtttccaaaatcggactgattttggcgggagtaggcggttcactgacaaatacattgttggttatgaatttgatttatctgttttttaaggatacgtatgcggcggcaaatggagttgcggtgaaagcggtttatggatttattctgtcgatcatcggaatcaacggagttccggaggcgattgttgcaggagtgctcacggcattgatcggaagaacgctgatgaagaaaaatatgaaagaaagactgggatttacacatggttttagcgattgatatcggaaatacaaatatagtgatcggatgtattcagaacaaggagtgtctgtttgtagaaaggctctcaaccgttcatcagaaaacagaaatcgagtatgcgatcgacattaagacagttctggatatttatcatattgatgtggagcagatcgaggggggaattatttcctcggttgtaccacaggtgaccaatgcagcgaaactggcgctggaaaaaattttgaaaaaaaatgtaatggtcgtgggagccggagtaaagaccggactgaatatccggatggacaacccttcttcagtgggaagcgatctgattgtgggagctgttgcaggtgtggcacagtatccggtaccgttgattatttttgatctgggtacggccaatacagtttgtgtgatcgataaaaacaaagactatatcggcgggatgatctatccgggaattcaggtgtccgtggattctctgactgcaaatgcatctcagttgagcgggatcagtctggaagcaccgaaacagatcatcggaaaaaatacggtagactgtatgaagagcggcgtgatctacagtagtgcatcggcaatggatggcattattgatcgtatggaagaagctctcggagaaaaagcaactgtagtggcaaccggtggacttgcgaaaaaaatagtacctcactgtaaacgggaaattacattggatgatgaccttctgttaaaagggctggcgatcatatacgataaaaacgtgagtacgaacagaaaataatcaaatttacagaaattacttgaattgcatgccagaaagcactataatggggtgcagataagaaataaatcttcggggtcgggtgtaagtcccaactggcggtaaagtccgcgacctgttttctgctaagagtggaggatggctgaaccggtgatctgcagatcagaaattccggtaccaacagtaaagtctggatgaaagaagatgtatgtgcaaaaaggcaagagagagaccctggattttttgatccggggtctgtttttgtcttggcacacaatccggaaggttttctttctttatcaaaattttgatgtattttgaaggagagaaaaaacatgagtacacaaacaaacacagcagagaagagtacacagaaaataggtgcaagaacactggcgcttgtcggaatgctttccgcagttgcagtggtgttgatgacattcgacattccgcttccgtttgcacccacattttacaagattgatttcagtgaagtaccggttctgattggatgttttacaatgggaccgcttgcgggtgtgggaattgagctgatcaaaaatctgctgcatattgttatcagcggaactcagacagcgggagttggagaggtagccaactttctgatcggatgtgcatttattgtgccggcaggattgatctaccataaaaagcatacaagaacaggtgcgttgatcggtatggcatcaggcacggtattgatgacggtgatcggaggactgatgaatgcatatgtattgcttccggtgtatgccaaagcatttggaatgccgctgaatgctctggtagagatgggaacagcgatcaatgcaaagattacaagtgtctcaacactgatcctgtttgcagtgacaccgtttaatcttctgaaaggtgtgctggtgtcattgatcgtatttttaatctataagaagatcagtccgatttttcggatgaagtagaaaaatcaggaaaactttttctgtttatacagataatacccaataaaaaacagtgctgtcaaaagccaggtgaccggatagctgaagatgatcgcagaaattgtcggagaaatcttcagcacgccgatcagccaggcgattcgcatcacgcagataccaagcagcgtgatgatcactggtacgatgacatcaccgactccgcgcagtgcaccggcaagtacttcgatgaatacatatacaatgtaccagggagtgatcaggacaagcatctcacatccgatctggatgacggtctcatcatttgtaaacaggctgaacaaaatttttctggctgcgatcaggaaaataaccaatacagcggataccagtgcgtccataatcaggcagacacgggtactcttgcggatccggtccagttttccggcgccgtagttctgacccacaaaagtagtgatggaaattccaaaggcagtgcttaccatccagaagatcgcatccagttttccgtaggcagaccaggcggcagaagtatctgttccaaaggtgttgactgcggattgaatggcgatattggtaatggcaaacaggattgcttcgaatccggtaggaagtccaagcttcaactgatttttcaggaccgatccgtggaaccggatgcgggagaaggaaagctttaacattccctccgaacgaagaagcttgcgtgtcacgagcagggcgctgaatgcctgggaaatcaaggttgcaacggcgactcccagcacgcccatgtggaaagcgactacaaacaatacatcaagtatgatgttcagcaggcagcaggcaatcagataataaagcggacgtttggaatctcccacggcgcgcagaatactggaacccatattatataggaaaacaaaaataatacctgcaaaataaatccggagatagatcacggaatcctgcatgatctcatcaggggtgttcatcaatcggagcatagatggtgtagcgaaaaatccgatgattccgagcaggattcctcccacgatggagattgcataggcattgtgaagtccgtcactggcagcatgttcatttctcgcaccgaagtactgggcgatcaaaacagaagcacccgaagacagaccggtaaaaaagcccacgatcagagccacgatctgtgcagaggaaccgcccacactggcaagtgctgcttttccgacaaattgtccgacaatgacagtatcaatggtgttgtatagttgttgaaaaaaggttccgagcaaaatcggaaagaagaacaatagaagttgtttccagatcacaccctcggtgatctgatttatcggttgtttttgtgtcataataatccccttactcttaaaataatcaagttgataaactctctcttatgtaaagaatatcagattttacaaacgtttaacagagaaaaatagaagttctgggataaaatagaagaaggcaaaataaaaagaggcagaaagaaagggcctttgattttgtagtatttttacaaggggtgaaaacatggaacagtccgtggaatttttgatcaaaagtcattacgcgcagcttcgtacttcagaaaagaaagtggcagattatgtgcttaaacagggaatgaaatgcaaaaagatgaccattgagtcactggctgaagaaagcggtgtgagtcagccaacagtcatgcggtttgtcaaagcgtcaggatttcaaaattataaagaatttcaatatgcactgctgtgtcaggatatgcaggaaaaaagccggatggaagagaaagatgcagaacgggtgctttacgggtatcagctcaaacctcaggataccatggagagtgttccgggcaaggtggtatccggaacaatcgccatgatggaagaaatgctcaagagtattgccgtcagcgatctaaaagagacagtaaggctgatctcaaatgccagaagagtgcatattttctgtgtggaaaattcggcggcgaccgcagtggatctgatgacaaaactgttatatctggggatagactgccagtattatacggattattacctgcagagaatcgctgcctcgagtctgcatcaggatgacacagtgatcgctatttcttattcagggcagtccaaagatgtggtggatacagtgaaaactgcgaaaaaagcaggggcgaaggttgtagttatcacaaattttgagcagacccttctggaaaaatggggcgatgtggtcttaaagagctcccaaaaacagttgttatatggggatgcaatcttttcaagaaccacgcagatggcattgattgatatgctttatatgggcattattttaagtgactatgagaaatacacacaccagttggataaaagcagcaaggttgtacgggataaggcatatagctagaactaccgcgaaagttttgtagggaatctacaggaatttcgcggtatttttttgtgcattttacatttctctaacatgattttgaaatggatttgattgagtctgaaaaatcgcattgctataatttccagtgtcagcagggcaaacgcccactaggaaagaaagggagaattcagatgctgaaattagaacagataaaaaaatcctatgacggagttgaaattttaaaagaaatgaacctggagattgaggatggtgagattgtttcgatattgggaccatccggatgcggaaagacaacactgctgaatctgatcttagggattacggaagcagacagcggaaagatctggtttaacggagaagatattacgaatcttgcaatggaaaaaagaggattcaatattgtgtttcaggactacgcactatttccgaatctgaatgtatataagaatattgtttacggactgaaaaacagaccgggaatctcatcggagaaagaagtggaagaactgattgagctgctgggactgaaagaacatttgaataagaagatcgaccagctctcaggcgggcagaagcaaagagtggcacttgccagaacattggtcatgaagccgaaaatcctgctcctggatgagcctcttagtgcgctggatggcgtgatcaaagaatccataaaagagaagatcaagacgatcgcaaaagaatttcatctgacaacgatcattgtgacacatgatccggaagaagcgctgacattatctgatcatgtactgatcattcaggaaggaaagatcgcacagtacgatacaccggaagaaattattaaaaatccgggaaatggatttgtcagagagtttattttaaaacagctggagatcaagaaaaataatatctactctctgtttacagtgcctaaaaatattccgggcgtcgcagccggaaaggtacaggagatactgacagggcgggaagaactggtacaggtgtcataggagaaagagatgaaaacgaaaaatcgggaattaaagattatttttatggtgacaggagcactgtttgcgctgttccttgtgtatccgacagtaagacttttattaaaatccattctttcagagaacggaatgacaatggaattttatcattcggtgctgacgcagaaagggtttttaaaggcgctgggaaacagttttctgatcgcgggagtcagcgcgcttctgacaacaggactggcattttttctggcttacaccattcattatacaaatatcaatgcaaaattcaaagaaggaattgagaaagcggctgtgcttccgatgttccttcccacattgacatatggatttgcgattatttattcctttggaaagcaggggcttctgacaaagctatttggcagacagttgtttgatatctatggatttaacggactgctgatcggctatatcatctatacgctgccggtgtcttttttgctgatccataacacaatgggatatattgataaaaaattcatgatcgtttccaggatcatgggagacaatcgagtttctacttttatgatgacaattttccgccctttggcaggaacgctgatggcctcgttcatccagtcgttttttctttgcttcacagattttggtattcctgcatctgtgggcggaaaattcgaggtcattgcgagtgttttatatagtcagatgctggggagtgtccccgactttaataaaggaagcgtggttgcagtgatgatgctgcttccgtctatcgtcagtatcgcactgcttcgttatctggaaaaatacaatgtgcgctatcagaaaatatccgtgatggagcttccgaaaaatcgtggaagagactggctgtgcgggattggaagcgggctgatcatcctcggtgtgttatccatattcgcagtcatctttattgtgtcgtttgtgcaggactggccgtatcagactggattttccatggagcatttccgggctgtatttcaggatgcaggtttggtgggagtatacaaaaactcgctgtatgtggcacttttgacagctgttttcggaacactggccgcatatggaagtgcactgatcactgcaagaagctcccttggagctgtatggaagcggattatcgacggaatcgcactggtgacaaatacgatccccggaatggtactgggacttgcctttttgttctgcttttccggaacagggctgcagagcacatttgcaatcctggttttgtgtaatgtggtgcatttcttttccacaccatatctgatgatgaaaaattcactggaaaaaatgaatgcttcctgggagaccactgccatgctgatgggagacagctggtcaaaaacgatccttcgagttgtgacgccgaatgccatgtccacaattttggaagtattcagctactactttgtcaatgcaatggtcacagtcagtgccgtggtctttcttgcaggagcacggactatgatggtattgacgacaaagatcaaggaattacagtattacaataaatttaatgaagtgtttgtattgtcacttttgattttggttacaaatctggtggcaaaggcaattccggcgctggcagcagcctggaaacgtatgaaggaggaaaacagaaagatgggaactgcaaagaaacagatcttcaaacgggcaggagcagtgatggcagtaggtgtgctggtattttcggcagtatctgcagcaggatgctcttcgaaagaaagcgagcaggttgtgatttattccaatgcggatgatgaagtagtggcagcaatgaaggcagcactcgattccaatggatacgaagggcagtatatttttcagacattcggaacatcagagctgggtggaaagctattggcagaaggaaaaaatctggaggcagatctggtgacgatgagcacgttttatctggaaagtgcacaaaaagaacaggagatgtttacagatctgacatttgagtctggcacactggaagagtatccgtcttattgcgcgccgatcaccgtgcaggaaggtacgctgatcgtgaataccgaacagaagatggaggcagaaaatcttgatatgccaaagtccatcaaagatctggcaaatccggaatataagggcaagattgctgttacagatattacgtcctcttccactgcatggcttttgatccagggattgatttcagaatatggagaagaggaagcaaaagaaattctcacagatatttatgcaaatgcaggagatcatctggaagagtctggttcaggacctttaaaactggtgcgtgcaggtgaggttgccattggatttggacttcgtcagcaggcagtggcagataaagaaaaaggccttccggtggactatattgatccggaagaaggaaatttcacactgacagaatctgtagcggttgtcaataaaagtgaagaaaagaatgcaaaagcaatggaaatggcagagtgtatcatcaaaaacggaagggaagaactgctgaaaagttatccgattccgttgtatgagggagagtctgtgccggaaacagaaaaatccggtaatccaaagacattcccggaaaaactgaccgttgatcttttgaaaaaacaccaggaattatcagaaagctgtaaaaaatagaaagaagaaatgaggaaaagaaaaatgaaaaatttaggaactgcaggatataaattactgacaccgggcccattgactacaacagagacagtaaaagaggtgatgttgtttgatcactgtacatgggacgatgattacaaagaaatcacgcagaagatccgcagagatcttctgaagctggcgcaggtggaggagactgaatatacgacagtcctcatgcagggatcgggttcattcggtgtggagagcgtgcttggaagtgtagttccaaaagacggatgtgtcctacttttgagcaatggagcatatggagaacgtgctgcaaaaatgtgcagctattatgaaatcccgtgtatccatgtgaaacaggattacaataagacaccggatgcaaacgaggcggaagaactgttgaaaacacatccggagatcacccacattatgatgatccacagtgagacgacaagcggaattttaaatgatatcgagagtattggaaagctggcagaggcatatgggaaagtattcatcgtggatgccatgtccagctttgcgggagtggagattccggtaaaagactggtacattgatttcctgatcagttccgcaaacaaatgtattcagggtgttccgggattttctttcatcattgcaaacagagtacttttaatggaatccaaaggacgtgcgagaagtctttgtctggatctgtacgatcagtgggcgggaatggagaaagacggaaaatggagatatacttctccgactcatgtggtgctggcatttgagcaggcaatgaaagagctggagcaggaaggcggaatcaaagccaggcatgcaagatatcagaaaaacatggacacactggtggaaaactttgaaaatctgggattcaggctgtatgtagacaaagcgtggcagggaccgatcattgcgacattcctctatccggaaggaaagcattttgatttccaggagatgtatgcttatattaaagagagagggtatgcgatctatccgggaaaactgacggatgcagacaccttccggatcggagtgatcggtgagatctacgaggaagatgttttgagactgacagagattatgaagtcttatatggaacaagcatagaacgggaaaggaaagaaacaacatgagaaacgtagaagcagtaatttttgactgggcgggaacaacagtagattatggatgctttgcaccggtgcaggcatttgtggaggtatttaagcatttcggaatcgagccgacgatgcaggaggtaagagaaccgatggggatgctgaaaatcgatcatatccgtactatgctgcacatgccgagaattcagaaactctgggaagaaaagtacggacaggcttccacagaagaagatgtggaaaaattgtatggtttgtttgaagaaaagctgatgagcattctggacaggtttgcacagccaaagccatatgttctggaagtggtaaaggagctgcgtgcccgtggaatcaagattggttctacaaccggatatacggatgacatgatggcagttgttgctccgaaagcaaaagaagctggatatgagccagatacctggtttagtccggacagtgtgggacatgtgggacgaccgtatccgtatatgatcttccaaaatatggaagcgcttcacgtatcatccgtagaacatgtagtgaaagttggagatactgtgtcagatattttggaaggaaaacatgccggagtttttacagttggtgttgtggaaggaagttccgagatggggctgacagaagaagaatatgacgctctgacacaggagaaaaaggaagaaaagattgaagaagtacgtcagagatttcagaaggcaggtgcagatgcggttattttgcatatgggagagctgctgaagcttttataggtataaaaatagagagcaggctcacagctgctctcttgtgttatgtgtgaaatattatttgatctgctgtatacatttctccaaaacatagcggatcggtttgaacaatacgagacatacaatgaaattgctgatacagtgtatgatatcgaatagaagtcctgacgtccaatatgcaaatgcaccggaaatcccgccgattgcaaagtaggggatggtacagagtgctccgaatgtaataccatagatcccggagaggatactccagaaccatacggaatcatttttccggaaaaggagagtgatgagtgcctgtatgctccagacatacaggtagtttatccaccagagtccaaatccatagatcagaccttccagaaaaacaaagatgtaaatgataaagaatactttctttcgaaacacaagtgtatacacaaggatcaaaagggtgacgatctcaatattgggcaggaaaccaagggaaacctgagcagccagaaggactgcgctcaggataccgtatattacaatttcccgtgttttcatcaatatccttctttcaatgtaagctcaaatgcatctccgtcagaaactggtgtctgatctgcggaagtgttgacctgttctccgccttttgtgatacaccaccattgttgtttggaatcatccgctgtttcttcatccacagttgtaataaacagaccatattctccagactcaccgtccacgagattctcgctttctaaaacttctccaagatattttgcatctgtgtcaaattcgaagacattctctgtctggtctccgtggatgacggtcaccgtaatatgtttttctccttcactggctgcaggcttcatgttctgatataaaaccccggctccaatgcacagcaggattaagatgacaattcctgcaatcagtccgctttttttcttcatgtttttatcctttctgcattcttatttttcatctataaatgagcaagttcgtgattttgcataaaagaaagacacctcgattccatgtgttgtataatgaaagtgccaaaacaaacatttgcaacatttacgaaagaaggtgtctctcgcaaatactatacatcattcctcattcatatacaaccagtttaaaaaattaaacttatgcaaattttattcgaaccgagtaataaaccatcttatgagtatcctaatcagtattttcattttaggatatcatggaaaaactacggactttgctaaaaacagttcctgccacagaacgacgattgcccattttctcaattccggaaaatgggatgattcattactttcagatacgttaaaatgctctgtcattgagattatttattcagaagcagcacgcaccggaaagcctgttttctgcattgtggacgatacgattgcttcaaagacaaagccttcgtcacgggctttacatccgattgaagatgcgtattttcaccaatcccatttaaagggaaaacaggactacgggcatcaggcagttgctgttatgctttcctgcaatggcattgttctgaactatgcttttgtaatgtacaataagtcaatttccaagattgacattgtacaaagcattgcaaaggagctgcctgttccaccggtaatgtcctattttctttgcgactgctggtatgtttctgaaaagataatcaatacctttgcacagagaggtttccataccatcggtgctttgaaaacaaaccgtttgctgtatccatcgggaatgaaaaagaaacttcgtgaactggccgccgaattgtctgttacacatcgtgaatttgaccttgtgacagtcaaaaaacgaaactattatgtgtaccggtacgagggaaacctcaacggcatagaaaatgcggtagttcttttgagttatccggaaaaagcatttggtaatcccaaagcattgcgtgctttcatcagtacaaacgcagccctatctacacaggagattctttcctggtatgtgtgtcgatggccgattgaagtatttttccgccagtgtaaggataaactggcactggacagctatcagatacgctctgcacagggaatcaaaaggtactggctgcttatgtcactggcacatttcatgtgtgcagtgggtactggtaggttctgttcgtttgaaactggatatcacgaaatctgtgataccattcagctggaaaagtatcgttatctttttcaatgcgcaaaggaaagcaatgattttgattcatttatgaaattcgcagtgtagttttgtgcaatttttcaaatttgctcatttatagttttcatttgaaatcataaaggtacatcctgattttgtcaaggaatatacatcttacagaaacaaaccggttttaatccatagagaaaaatatgagaattttacgggaaaaatttccggttgacagtttttctgttttatattagaataccaaacgtaacatttttgtaatatttgtaatatttacgaaatttagttcatataatttacaagaactacgtaataatattgcaataatcaggaggttatttatttatgaaacagagaaaacgatggatggcagtacttactgtatggacaatagcgttgttatttgcagcaggtttcacgagtcaggcatccgtttccggttccaagatgattcaggaaaaaaatagcaaatatacaacaggggcaggggcgattgctgctgcgatggagagtattccggcagaggcagtagaacttaccaaagccgaggcgcagaaagcgcaggaagccagagagcaggcagaagcagaagcaaaacgaaaagcggaggaagaagctgcgagaaaagcggcagaagaagctgcacgggcacagatcgctgcagaagatcagaaacttctggcatcgatcatcttctgtgaggcaggaaatcagccttatgaaggacaggttgcggtcggagcagtgatcatgaaccgtgtcagaagtggtgtgtatccgaacagtatttccgaagtaatctatcagtcagggcagtttggcccggcgatgacaggatggctggatactgtccgcagctcggaaggatatacgcagactgctatgcaggcagcggcagatgcgatggcgggagtcaatccgatcggagactgtctgtattttggaaatggaaattatggaattcagattggagatcatttcttccattaaaaattgaataaagatagaaaagaataagtcgctttacggaatagacgcccccacgagttgcaacgagggcactgaaaaagtagataatactgcctatatttgatacaatgtgtatatcaaatataggtggtgtttttatgatcgaacaacagcagaaattggtgctaagtccatacatggaaatatatgaattagtaatcccgaaagataatcttcttcgacaaataaaagaattggttgattttagctttatttatgaggaactgcttgataaatattgtctggataacggacggaacgcagttccacctattcggatgtttaagtatctgcttttaaaatcaatttatgatttatctgatgttgatgttgtagaacgttctaaatatgatatgtcttttaaatattttctggacatggcaccagaagacgaggtcataaaccctagttcattaactaagtttcgcaagctgcgcttaaaagatatgaaccttttggatatgctaattgcaaaaacggttcagattgcattggataaaggaatcataaaatcaaaatctattattgtggatgccactcatacaaaatcaagatataaccagaaaaaaccgcgtgaggcacttcaggatcagtctaagaaactacggcgtactatctatgaaatagatgaaacaatgaaaaacaaattccccaataaaaacatcgaagattctttagaaaaagaattagaatactgtaaacagcttatctcagtcatcaagggaaacgaagaattatgcaattatccgaaagtacaggagaaattaaatctgttggaagaatctgtaagtaatgatatggaacatctggaaacctcaaaggatggagatgcaaaaatcggtcataaaacagccgatacatctttctttggatataagactcatatcgccatgacagaagaacggatcattacggcagcaactgttaccagcggagaaaaaacagacggaaaagaattgccggcattgattcagaaaagccgagaagcggggatggaaattgaaaccgtaattggagacaaagcgtattcaagcaaagaaaatatagatgcagctaaaaatggagattatgaacttatatcccgattaaacagtattgttacccaagggaatcgtacaaagccagatgagtttgagtttaataaagatgcaggtatgtaccaatgtaaggcggggcatctggcaatacgaaaggcaaaagacagcaggaaatcagagggtaaaaatccaagagtcgtatattttttcgatattgagaaatgtaaaagatgtccgtatagggagggttgttataaagaaggtgcgaagtcaaaacaatatacggaaacccttatctgtgacaggcatagtgagcaggcacaatttcaggaaacggaatattttaaaagcaaggcaaaagagcgatataaaatagaagccaagaatagtgaattaaaacgtagacatggttatgacgttgcgtcatcgtcaggtcttattggcatggaaatgcagggagcaatgactatatttgcagtaaatcttaaaaggatcgtaaagttaatgagagaaaaataatcagattcagcatataattcaatcaaacagaattcagaaaatccaccagaacttgatttgagactggtggatttcttatgcctttaaaaataaaatttacaaaacctatgtttttcagtgccctcgttgcaacccgtgggggggcgtctgtccagttggatatcaacttcatttgccaaagcagaccctataactgtatcttcgaaaatgcttccgcaaaggcagtgttgatcggctcttttgcttcttttgcctgtttccgtaaataatgattcacgtcttttttgcttgcgccttttccttcttttttctttcgttcctcaaaagaactcagtttttctttgtgtccgcagacgcagacaaatcgttgtccgtcgccttttcctacaaggtccattttcttatggcataccgggcagcgggcattggtatggcgggagatggtttctttgtgtccgcattcccgatcctgacagacgagcaattttccgtgttttccgttgacttccagcatgaatttgccacattccggacatttggtgcgtgtcatattgtcgtggcggaaggtaccgtctgcagatttgatctcctgaatgagagcctttgtgtaattgtcgatctctttcataaaggttttgtcggattcttttccttttgcgatcgcctgcaggcgcatttcccaggaggcagtcagttccggactctttaagtcagaaggaaccagggagagcagttgttttcctttggatgtgatgtgaatctcatttccctttttctccatcagaaaactgttgaataatttttcgatgatatctgctctggtggcgactgtaccgagtcctccggtctctcccagcgtttttacgacatccttatccttatgtttgagatacttgaccggattctccatggcggcgatcagagtaccttcggtgaagcaggctggcggtttggtcttgccttctgtgatcgtcagtgcggtgacaggcagtgtctcgcctttttgcacatccggcagggaaatctgggagaatgtggtctgttcttcgtcctcgtcttcgccgtcagtatagcccgactcataaacttctctccagccggcagatttgataaaattgcctttcgcgctaaagcgttcttcgccgatggtgccgctgatggaagtctcttcatactcgcaggcaggagagagaaccgccagaaaccggcgcacgaccaaatcgtaaattttgcgctcttcattgctcatgtggtcaagctgcacaaactgttcggtcgggatgattgcatggtgatcagacactttgctgtcattgacaaaggatttatttgcctgaagtttttgcatggaaagccgtccggcaatcttgctgtaaggacctactgcgcaggcttttaagcgttcctttaaagtcggcacgatatcggtagtgaggtaacgggaatcggtacgagggtaggtgagtactttgtgattctcgtaaagtctttgcatgatattgagggtctgttttgcggaaaatccgaatttctggttggcttcccgttgaagtgcagtcaggtcatacagtgcaggtgcgaatgtttttttcagctttttgcgtacatccgttacaagcagtgacggagcggaggcctgtttgatcgcctggatgcggtctttatcaaaggagcgggaagagccggatctggcatctgtccatgtaaatgtgattccgccaaccgcagctttgagtccgtaataaggaaccggcttgaaggtgcggatctcttcttctctggcagcgatcatagcgagtgtcggggtctggacacgtccgcaggagagctgtgcattgtatttgcaggtcagcgctctggtagcattgatcccgaccacccagtcggactgtgcacgggcaacagcagcgcggtacagtggctcgtaggatttgccggggcgcagattctgaaaaccttcccggatggctttgtctgtaacggaggagatccagagtcgcttcagcggcttctgatttccggctttgtcaaggatccagcgtgccacaagttccccttctctgccggcatcggttgcaatgatgatatcagagacatctttccggaaaatcagctctttgacagcgtggaactggcggccggtctgtttgatgactaccagcttccagtgctctgggagcatgggaagcgtatccatgttccaggtcttgtattgttcgccgtattgctccggatcagccagtgtgacaaggtgacccagcgcccatgtgacgatatagtctgttccttctatataagtatttgtttttttattgcagtgtaaaacccgggcgatgtccctgcccacggaaggtttttctgcaatgacgagatgcttcatagtgtttctccttcttctgtttaaaatattcagacgttatggaagccttttccgatgatctcacttgtattggagatgagaataaatgcggaaggttcttcgtctttgataaaattacggagccggacagcctgcgggcggttcagtgccgtgaagatgacgtatttgtcttttccggaaaacgcgccctgtgcatggcagacagtagcgcttcggtttaattcctgtacaataaagtcgcagatcggctttggattgtcacatactacgttaaagtatttggaaagattgaaactttcaataaaagtatcgatcataaacgagcggattgcaagtccaaggaatgaatacagccctgttgcaatgtcgaacatgaaacaaccagcaacggtgatcagcacatctgtgatcaaaagagcatgtccgatatctacgctggaatattttttcaggatcatggcaatgatatccgtaccgccgctggaagagccgatgttaaacaggatcgcggaaccaagagacggaagcgcgatggcaaaacaaagctccagcatcggctgatttgtcagtggtgcactcatcggatagatccgctccagtgcggagagcgcaactgacaacagaatgctgcagtaggcagtctttgcggcaaattttttgccgagaataaaaaatccgatgatcagcagaatcatgttagtgataaagttgaaatctcctgcggacatcacgccggttttggcaacgagaaccgcaagaccggtgattcctccaaatgtaaaatgatttggaaatttgaaaaaataagtgcctgccgccatcaccagtgtactgaaggtcagcaggaaaaaatgtcgtagtttacttttcatgtcgaatacccccgaataagataagaaaattgtagcttgtgctttctcaaaagtcaatgaattatcgtcggattattggaaatactaactttcaacaaggagggtgaaaaaagatgtatcaggatttaccgattcaggatatttacgcaagagaaattttagactcccggggcaatccgacggtagaagtggagatacttgccggggagaaaatcgtgggaagagcagcggttccatccggcgcatcaacgggaaaatttgaagcagtagagcttcgtgaccgggagaagcggtatggaggaaaaggggtagagcaggcggtgcgtcacgtcaatgaagaaatcgccgaggctctgattggaaaaaatgtgttggcacaaacggagatcgatcatattttaaaggaactcgacggcagcattgacaagcataatctgggggcaaatgcaatcttaggtgtctcgctggctgcggcaaagaccgctgcggctgcacttaggattccgctgtatgactatcttggaaatgtaggagaaaaggtaatgcctattcctatgatgaatgtgttaaacggcggtgctcatgcggacaataatctggatattcaggagtttatgctggttccttatggaccggacagctttaaagaaagattgcgcatggggacagaaatttatcacgtactgcgaacacttttgaagcaaaaaggattgactacagctgtcggggacgagggcggatttgcaccggaattgagagattccagagaggcgattgaatttctgatcgaggcagcacatcaggcgggatatcagccgggaaaagatgtagggattgctttagatgtggcggcttcagaaatttaccgggcaaaagaacagcggtattattttgtgggggaaagcaaaaagagcgggaaaaagatcgcgagaacatcggatgagatgatggaatactatgaaagattgattctggattatccaatctattccattgaggatccgttggatgaggaggattgggatggctggagcagactgacagcaaaaattggggagaaagtacagcttgtgggagacgatctgtttgtgaccaatccggagagagtcgcattggggatagcaaaaaaagcagctaattcggtgctgatcaaggtgaatcagatcgggacactgacagaggcggcaagagcggtggaactggcgcatcaggcagggtatcggacgattatgtctcaccgatctggtgaaacggaagataccacgatcgcagatctggcggtggcatttcataccggacagatcaaaaccggtgcaccgtgccgctcggaacgtgtggcaaaatataatcagttgcttcgaattgaagaaacattgtggaaatccatgtgatgagaggaccattccggagagagtgagagatctttttccggagtggtcattttattttacaaactgtacatatttgatattgacagtaattacaatttgagatatactgtacttacaaggtaagtacagatatgacagaaggagtgatgaagtggaaattattttaagtaatgccagtccgaaaccaatctatgagcagatcacttcccagataaaagccatgatcatgaacggagagctgaaggcaggagacccgatgccgtccatgcgaaagcttgcaaaggagcttcacgtcagtgtgatcacgacacagagagcttatgatgatttgcaaaaggacggatttatcgtgacagttccggcaaaaggaacctttgtatctgcacagaaccaggactttatccgggaggagaacagaagacgggtagaactgcttttaacagatgcggtagagctggcaaaggaaaatggaattgaacttgaggaattgagaaccacattagacgtattgtatcaagaggaggatgtgtgatggaatttgcactggaagtcaaaggactgcgtaaaacatacaaagaatttggattaaaaaatatttcgatgaaattgcccaagggctgtgtgctcgggctgatcggagagaatggcgccggaaaatctactctgattaatgcgattctcgggctgattgaatgcgactatgagtctttaaggatttttggacaagagtatgcaggaaatgaaaagcagatcaaagaagagattgcggtgatctttgacaagacctgttatgatctgaattttacaccgctgtttatcggaaagatattgagtaatgtgtattccaactgggatatggaaaaatatcatatgtatctggatcggtttgaactgccgaagaaaaagaaattaaaagaattttccaagggaatgaagatgaaaatggaatttgccgcagccctaagccacgatccgaagcttctcattctggatgaggcgacaagcggtctggatccggtattccgggacgagattctggatattctcagagagtacacagaggatgaagaacatacgattctgatgtcctctcatattaccagtgatctggataagatttcggattatatcgcatttattcatgctggggagttgttgtttacaaagacctatgatgagcttcaggaaaattacggcgtcttaaactgtggacagcggatctttgacgcactgaaccgggaggatattgaggcatacagaaaggatacctatggatatcgggttctggtcaacaataagcagggaatccggaaggtattttcagatctggagattgaacaggcaacgatcgaagacgtgatgctgtactgcgtgagaggagagaaagtggcatgagagggattattttaaaagatttatatgagggattctgtattaagaagaatctgatcaactggctggcttctatgatatttacgtctgcgctgacagcgatcagtgaatttatgagaggtgcctatggatttttgctgattgtagtactcctatttcctgtgatgggaagtacactgcttcagatgacggtggaacaggatgaaaaggcagaatttgaccggattcagctcacctatccgctgagcaaaagcgagattgttctgtccaaatatctgggcggtctgatcgtacagggaggtatgacactttattcatttgtgtttgtattgatctatgtgtatggatatcggacgatcaccctggaagacgcacttccgacatggggaatcggtgtagtcggaggtgtgatttactttgcagtgagctatgtagcatatttctggcttggtaatttgaaaggtgtgatttttacatttcttgcgatggtaggacttgtaattgcgtttttgctcagcgtgtttaatatcgggctggaggaaatcatgcaggtggaaaaaagtatttggatcattggttgtctggtgatggcagcagtgttgatggtgatcagctactttctatctctgaaaatatacacaaaaaaacattcttgaaatagttattttgcacaaaatatttatgcagaagaaatgttgacatgtaaacaatataaataatagaataaataagaacaaaacctatttgcagcagagacaggactggtttttcgtgcagataggtttttattatgtattaagaaggggaaaagatgcggatagacaggatattgaacaacaatgtcgtgatcataaaagatgagaatggagaagagcaggttgtctgcggaaaaggaatcgcctacaagaaaaaggcgggagaccttttatcagaaaagctgatcaacaaagtgtttgttttgaaggacactgctcagaaacagcattttcaggagattatctctgagattcctgtggaatatattcagatcacgacagagattgtggagatgctcacacaaacactggaaagaaaactaaatgaagcaatctatatttcgttaagcgaccatatttatatggcaatcaccagatatctggacggtgttgtggtgaagaattccatgttgtgggatatcaagcgtttttatgagaaagaatatcaggcggcgaagaaggtctggaagatgatcaatcagacgttcaaggtagaattaccggaagatgagattggttttattaccctgcacattgtcaatgcagagatggacaatgagaatttgaagcagacgatggaagttacaaagctgatgcaggagatttccaatattgtccgttattatttttccgtagagtttaatacagaatcggtttattattatcgttttattacccatttgaagttctttgcacagcgtcttctgacagataaagagtatgaagacgatcaggacaacgaacttttcaatacaattcggcaaaagtaccgcacttcttataagtgtgtggaaaaaatcgcagagtttatatcgcgtaaatatgaaaaggaactttcagatgaagaaaaattatatctgaccattcatattgaacgcgttatatataagagcagagattagcgaatcatctgaagcgcgcacagatgaggagtgtttctgctttgtcaggatggtaacattaagttggctacacctttatacaatgaaaactgtatataaggaggatgacatgggtaaatactcaagtttagccgcagacattattaaaaatgtcggtggaaaagaaaatgttgaaagtttaagacactgcgttacaagattaagattccgtctgattgatgaatccatcgcaaatgatgaggtcatcaaaaatatggacggtgtggtgaccgtgatgaaagccatgggagaatacatggtagtcatcggggagcacgtggcggatgtatacgatgaagtatgcagccagcttggcttagacgccatgcaggcagagaacaaagaacagaaaaatgcgaaaaagaagagtcccctcgagaaagttctgggaacaatcatgggtggtatgggaccgactcttcatctgctctgtgcctgcggtattatcaaagggctgttagtccttctgacatttgtcggaatcaaaccgacagatggaatttatatgctgatgaatgcagcaggagactgtttcttctatttcctgccgctgattcttggatttaactttgcaaaaaaattccagatcgatccattcttcggactgatcctggcagctgcaatgtgttatccggcaattcagaatgtagacatcaatttatggggatatgtcgtaaatacgacctatacttctacattcctgccgattttatttggtcttctggcagcagttccgctgtataagtggtttgacaaagtgcttccgaagatgatcaaaggttttatgacaccgatgcttacattgatcattattttcccgctgacctttattgtgatcggacctctggcaaatatgatcggtgcgggacttaatgttgttctcacaagtatctgtgaattctcaccgctgcttgcaggactgattctgggcggatgctggcagatttttgtattgttcggtatccatggtgttcttacaatttttgcgtttatggatctgctcgcaggaaatccaagccagctgctggcattttcctacggtgcatcctttgctacatgcggagttctgctctcaatcatcttaaagacaaaagatgcaaaactcaaagaagtggcactgccgtcctttatttctgcaatcttcggagtgacagagccgggaacttacggtgtgacacttcctcgtaagaagatgtttgccatctgctgtatcggtggtgctgcaagtggtgttgtagttgcactcagcaacctggcgatgtacagctatgcgggaatgggaatcatcggtcttcttggatttgtcaatccggacggaccgaactttatcggaatcgcattatctgcgatcgttccgtttgtggtatcttttgttcttggtatgctggtttacaaagattccgattatgaatatttgaatgatgtagtagaaacagacatcaagtcagtgtcaaaagaagagaagacggaagagaaaaaagaagctgctccggcgcttttaaaagaaaaagagatgctcgcaatgccggcagacggtatgatcaagccactttccgaagcggcagatgaggcatttgcgaatgaagcgcttggaaagggttgtcttgtaatcccggaaaatggaaatgtatatgcaccgtttgacggtactgtacgtgtgctgttcccgacaaaacatgcgatcgggcttgccagtgagggtggatgtgaagcgctcatccacatcggaatcaatacggtgaatctggatggaaaatatttcgaaactcatgtacagcagggagactgcgtgaaaaaagggcagcttcttgtatcctttgagaaagaaaaaatcgaacaggaaggttacagctgtgagattcctgtgatcataacaaacacggatgagtatttggatattgtagaaaaagatcatgaccgccatgtacatggtgaggacatgctgcatgtgattcgatgaaaggagtaaaagagcaatgagttttccaaagaatttttactggggcggcgctacagccgcgaaccagtgtgaaggcggctggaacgaaggtggaagaggaccggccaaaacagatgtgacaacaggtggttccgcaaagaaatcaagagggatcacgtaccgcatgccggacggaacagaaggcatggtgggcggattttcccggataccggaaggtgcatcctatgcagtgctggacggatattattatccgaaccacaaggcgattgatttttatcatcattataaagaagacattgcattatttgcagaaatgggatttaagatgttccgtatgtcgatttcctggtcccggattttcccgaagggaattgaagaggagcccaaccgtgagggaatcgaattttaccggaatgtatttacagaactgagaaaatacgacatcgagccgcttgtgacgatgtgccattatgatacaccactgtatctggaggaagtgttaggcggatggacgaaccgtcagttggtggatgcgtttgaaaaatatgcaaaagtgatctttgaagaatataaaggactggtcagatactggcttacattcaatgagatcaacagtcagctgatgatgaagaatttcgttccgaatgctccgaaacagatgctggaaaatgcgtatgcaggacttcacaatcagtttgtggcaagcgccagagcggtaaagcttgctcatgagcagtatccggaatatgtggtaggatgcatgatcgcaggtatgacgacatatccgctgacttgtgatccgcaggatgttctgcgtgcacagcataagatgcaggaagatttctattacagcggggacgtgatgatccgcggacattatccggtatttgcgaagagaatgtggagagaagacggcgtgtcatttgaagtcccggaagaggatttggagattttaaaagaaggaagagccgatttcttcagtttttcctactacagcacaagctgtgagacgacacatacagatgcaccaaaagacggggcaggcaatctggtactcggatataaaaacccatacatccagtattctgactggggatggggtatggatgcggacggactgcgatacattctgaatgagatctatggacgttatcaggtgccgattatgattgtagaaaacggactcggtgcgattgatactgtagaagcggatggaagcatccatgatgactatcgtatcgcatatttgaaggatcatgtcagagcaatgtcagaggcaatcgatgacggagtagaactgatcgcatttacaccgtggggatgtattgaccttgtcagcgcatctaccggagagatgagaaaacgatatggctttatctatgtagatatggatgatgacggaaacggatctatggaaagaagcagaaaagattctttctactggtataagaaggtcattgcatccaacggagaagaattagaataagagacaggggactattcgaaagagtagtcccttttgtgtaaaaggttaaaaatctgccacatttttctgaaacagtaaaataatgacataaagtagtagttttgtaaatttactttccgaattgattatgttataaccattacaaatcttcagtttaaggtgaagaaggaggttaagagaggtatagtcagtaagattttattttaaattttgagaggaaaaagggtatacatgaaaacaaggagaaagaaacagacaaaacgtgttctggccagtgcactggcagcagtggttgcagcatctgcagttccggtttccaattcagtcgttcatgcagaagaatctcaggacaggagcgaattaaagctgagatatacaagcgcagcaccggatagttatgatggatgggaaaaatggtctcttccaatcggaaacagtggaatcggggcaagtgtatttggtggtgtgcagacagagcgtattcagttgaatgagaagtcactctggtccggcggaccaagcgaaagccgtccggattataacggaggaaacctggaagaaaaaggaagaaacggacagacagtaaaagagattcagcaactgtttgctaatggggacaatgatgcagcaagcagtaagtgtggagaactggtaggtttaagtgatgatgcaggagtaaacggatacggatattatctgagttacggaaatatgtatctggattttaaaggtatctcggacaaagacgttgaaaattacgagagaacactggatctgaatacggcaattgccggagttgagtatgataacggggatacacattatactcgtgagaactttgtaagttatccggacaatgtacttgtgacacgactgactgcggaaggtggcgataagctgaatctggatgtcagagtggagccggataatgaagcaggcggtggaagcaacaaaaatacaatacaggcgcagtcttaccagagagagtgggaaacaacagttaaggatgcgctgatttccatcgacggacagctgaaagacaatcagatgagattcagctctcagacaaaggttctgacagaaggcggaacaacagaagacggagacgaaaaggtcacagtcaaggatgcaaaggctgttacgattattacatcgattggaacagattacaagaatgattatccggtatatcgcacaggggaaagccaggagcaggtcgcttccagagtgcgtgcttatgtagataaagcagcagatactgtagtaaatgattcttatgatactttgaaacaggcacatgtggatgattactcttctatctttgaccgtgtcaatctggatcttggacaggttccttctgagaagacaacagataaactgttgaaagcttataatgatggttcagcaagcgagcgggagagacgctacctggaagtgatgctgttccagtacggccgttatctgacaattgagtcttccagagagacaccggaagatgatccgtccagagcgacacttccgtctaaccttcagggaatctgggttggagcgaacagctcagcatggcattctgactatcatatgaatgttaatctgcagatgaactactggccgacctattctacgaatatggcagagtgtgcgcagccgttgatttcgtacgtagattctttaagagaaccaggacgtgttactgcaaaaatttatgcaggtgtggatcagggatttatggcacatacccagaacaatccgtttggatggacttgtccgggatggtcatttgactggggatggtcaccggcagcggtaccgtggattcttcagaattgctgggaatactatgaatttacaggtgatgtatcctatatgcaaaattacatctatccaatgatgaaggaagaggcaattttctacgataatattttgatagatgatggaaccggacatctggtatcttcaccaagttattcaccggagcatggaccaagaacggcaggtaatacttatgagcagacactgatctggcagttatatgaggatactatcaaagcagcagaaactcttggtgttgatgcggatctggtggcaacatggaaagatcatcagtccaggttaaaaggaccgatcgagattggcgatagcggacagatcaaagagtggtatgaagaaacgactgtaaacagtatgggacagggatacgggcacagacatatttcccatatgctgggacttttcccgggagatctgatctcatctgatacaccggagtactttgaggcagcaagagtgtccatgaacaaccgtacagatgaaagtaccggctggggaatgggacagcgaatcaatacatgggcaagactggcagatggaaaccgtgcatataagctgatcacagatctgtttaaaaacggaattatgaccaatctctgggatacgcatccgccattccagatcgacggaaactttgggatgacatcaggtgttgcagagatgcttctgcagagcaacatgggatatatcaatatgcttcctgcactgccggatgcatgggcatcaggaagtgtcagcggactggttgcacgcggaaactttgaagtatccatgaactggaagaacaaacatctgacaagcgcagagattctttcaaataacggaggaacagcaactgttcaggttccaaatgcttcctttgcaacaattacagatgcaaatggaaatgttgtagatgtaaaagtagaatctcaggacagagtttcctttgagacacaggccggacagacgtattatgtcaaagatgttcctgtgaaaggggaggcaccgacaggattatctgcaaaacgtacagatgataatacaggaaaactgacatgggatgaagtcaagacgaaaaaagacaaagacattacttacaatgtatatcgtcagattgagtccggagacgtacagaaaattgcaggcggtgtagaaaaaacagaatacattgataaaaatgcagataaggcattgggtacgatccgatatcaggtatcagcagtagtcgatggcaaagagacaaagctcagtgaaaaagtagagctgacagagccgcttggagcaggaaagattgataataaggatccgcatattgtgtatacaggtgcatggggtgactgggacacagcaaacgaaggcaactacaaggatacgatcaagtatctgaacaaaccgacaggaaaagagactgtagaactggagtttgtgggaacaggcatcgaagtgattacttgtacaaatacagaccgtggaaaatacgaagtatttattgacggagagtcttgcggaaaggtagatacatacagttctactacaaaacgtcagcaggttgtatttaaaaaggatgatctgaagcatggtacacatacattagagctgaaagtgctcaatgaaaaagtagatgcaagttctggtacaaaagtagaactggatgctctgaatattctggataatacgatcacactgccggagaaagtagaagtatctacagtttccggaattacaacgatcggaaaagaaggcactgtacagatgcaggcaaaagtaacaccgggagatacaaaagacaagagtgttacatggacttcttctgatacaagcatcgcatccgtagatgaaaacggactggtgacagttcacaagaaaaacggagaagtgacgatcacagcaacagcaaatgccgattctgaagtgagcggaagctgtaaactgactgtggcactctttggagaccttggttccggagagacgatcgtagaagatgcatctgaggatggaaagagaaatgatgcgattagctggagcggctctgaatggtctacatgggctggagagccggagaaacatcatggaaagacaaagacagaagttccttcaactggaaaccaggcaggtaaatattttgaatatacgtttacaggaactggaattgaagtttatgcacagaaacatgcaaactttgcaagttatgatgtaagcattgatggtggaaaagctgaaaatgtgtcattagcgggatccggtggaggagatccacagcagaagatttttgaagcaaaaaatcttgagaacaaacagcatacaatcagatgcacaattgtagctcgtgacggaaaaacacaggcaaaccttgactacttaaaaatcttcgcaccggtacaggcagcggaggtgaataaagcggatcttcagacagccatcgaaagcggggccggactcatagagggcgcatatgatgcggacaaatgggaagcatttaaggaagcatacaaagtggcagtagaagtaatgaataatgcggatgcagatcaggatgcggttgaaaaagcagcagcagctctgaatgcggcgatggaagcacttggagatccaaatgttccggaaatcggagaagtacaaggagaagcagtacatgttgaaagttcagctgtgattctggaatggggtcaggtaaagggtgcagcatcttatcttgtaaaatggaatgatcaggaagtcaagacctcagatacgcgaatccggattgaaggattggaatcgggtgtgacttatgactttaacatttttgcgctgaatacaaaagatgtgccgtctgaaaatgcgattgaaattcacggaattacaacaacagatgtggtaaaaccgggagtcgttacagaaatcaaagcaacacctgttgatgaggattcagcaaagctgacatggacagcaccggctgacacagacgtggcaagctataatatttatctgaatggtgtgaagatcggggacagtaagaacacagaatttacaatggataaactggaagtcggaactgtttatgaggtacgtattacagcagtagataacgcaggaaatgaatcaattccagctccatttaagtttacatttacagagccggaaaaagagaacttcacattgaaggcagcagtgaatgcagaagaaatgggaatcgtgagtgtagaaccacagcaggattcctatgaagcaggaactgaggtaacagtcaaagcagaagcgaaggaaggattccgctttgtaaactggacaaagaccggaacagaggaagaaatcagcacagaagcagcatacaagtttgcaatcacagaaaatacagatctgactgcaaactttgtgaaagaagaagtgccagaagaaatcttccatgtaacgatcaaagccaatgacaatacaatgggaactgtaaccattgattcagcagacggaagctacaaaaaaggagaaaaagcagaagttatcgcagtggcaaacgaaggattccgttttgtaaactggaccgatgcagaaggaaacgtgatcagtgagtccaatccatatgtatttgaggtgacaaaggatctggatctgactgcaaactttgaaaagatccctgcagaaaaatatacattctctgttgcagcaaatgatgagaagatgggaagcgttgcagtagaaccgcagcaggatacctatgaggcaggaaccgagatcaaggtgagtgcagtgccggcatccgaggattatgaattcgtaggattcacaaagaaaggaacccaggagattgtcagcaaggagaatccgtacgtattccagatccaggaaaatatggaactgactgcaaactttaaagaagtagagcattcctacctgatctatgtagagtcaccggatccgcagatgggaacggtcacaatggatcctgcaaatgaaggaaacatctacaaagagggaacagagatcacggtgaaagcagagccgaaggatggatatgagtttacccagtggctggaagtgacagaagcagatggagaagaagttctgacaccagtagaaggcgctcaggcagaatacaaatttcatgcagagtcagaccgtgtactgcgtgccgagtttagactggctccggttccggaaacatactaccgtgttgtggtacagtccaatgatgagaacatgggaagggtttccatggataaagaggatggcacatacaaagagggtgcgacagcatctgtgaaggcagaagccaaagaaagatttgaatttgtgggctggaaagaaaaaggacagaccgaatatgtatcgaaggatgcagaatatcagtttaaagtgacaaagaacatcgagctgaccggagaattcaaagccgtggaagtgccgcatattccgagtgcacaggaaatcttagatgacattctggcaaaccataagattccatcagaagtgaaagcaggaacagaaactctggttctgccggaagttccagaaggaagcaagatcgagatcgtggcagtgaatccggaaggaatcattggactggatggaaaggtaacaacaccggaaaacgatacggatgtgattgtgaccattcaggtaactgatacaaacagagcaatagccaaagccgatgtgaaggttctggtcagaggagaaaaagcggatccagatcctaatccgaacccagacccagatccggacgacgataacaacggaaatgacaacaacagtggaaataataacaatggcggaagcaataacggcggaaacaacaatacaggaaacaatggtggaagcagcaacagcggaagtcataacaatggaagtacatccggttcacactctcagagtgtgcagacaggagacaatgccaatgtgatcatgtgggcagtacttctggtggcagcagtagcagcagtcggcgcagtagtgattatcagaagaaagaaaaaataaacaggactgtaaaagcctgaaaaaatgagatggtggatgaaataattggtttcatccaccatctttatcacgtaaatctattgcagaattgcagattttgtgttagactataaaaggttatccacaggaggtgtgaacgtatggatattttaaaaattgtgttaatgattatttttgtaatagattgtattgcattgtcagcaattattcttcttcaggaaggaaagtccgcagggcttggaacgatcagtggtgcggcagattcttattggggacagaataaaggtcgttctatggaaggcgctcttgtgaagtctaccaagtttcttgctattttatttttagtacttgcagcagtgctgaatctgaaagtatttaactaagagaaagcgataaaacactctatgcaaaaatagggtgtttttcttttatgaaaaattgacggaagtcgaatagaggatataaaaaaaggaactactaagtatgaaagaaggtgaacgaatggaacatacatttgagaaacgaaaaaaggtgatttatgatttgatctgtgacgatctttatgtaccgatgaagctgaaggagattgcgatgcttctgcagattccgagagaacagagaaacgaattaaaggaagtattggaagccctggaggcggatggcaagatttacgtctcaaagaaagggaaatatgtcaaaggacagcctcagtatttaaaaggaatatttcaggcgaatcttcgcggattcggatttgtgctcagagaggatgaagaggatgtttttattccggaagagaatatcaacggtgcatttcagggagatgaggtggaatttctgattaccaagtcaccggagggcagacgaaaagaaggaaagatcgtgcgtgtggtatctcatggaacgacaaaagtgattggtctgtatgagaagagcaaaagttttggatttgtacgaccggataatcagagatttttaaaagatatttatattccggcaggcaaagaaaaaggtgcgatgaccggacacaaggtagtggtagaactgacgtcctacggcggggaaaaaatgaagccggagggaaaagtcgtggagatcatcgggcatatcaatgatccgggaaccgatatcatgtctattgtgaaaggttatgatatgccggtggaatttccggagaaggtgctaaatcaggcggaacgtgtcggaaaagatgtaagtgaagcggatatggcagggcgcatggatttaagagactggcagatggtgaccattgacggagaggatgcaaaggatctggatgacgctgtttctctgacagaagtggagaacggatggaagctgggagtgcatattgcagatgtgaccaactatgtgcaggaaaaaagtgcattggatcgggaggcgctgaaacgcgggaccagtgtgtatctggcagaccgggtgattccgatgctgccccataagctttcgaatggaatctgttctttaaacgcaggagagaacaggcttgcgctaagctgtattatgactgttgacaaaaaaggtgagattgtggatcatgtgatcgcagagacggtgatccgggtggaccagagaatgtcttatacgagtgttgcaaaaattctggaagcgcaggatgagcaggagagacaaaaatacgaaaagctggttccgatgtttgaacagatggcagaagtttcagggctgcttcgggaacgcaggaaaaagagaggcgcaatcgactttgattttcctgagacgaagatgattctggatgaacagggaagaccagtggaattgaaaccatatgagcgaaatgtggcaacgaagatgatcgaggactttatgcttgcggcaaatgaaacagtggcagaagagtatttctggagagagattccgtttttatatcgtacccatgaggcgccagaagaagataaggtaaaaaaactgagtacgtttatcaataatttcggatatcacatccatatggggaatgaaatccgcccgaaagaaatccagaagctgctggaaaaagtggagggaactccacaggaggctctgatcagcagactggcgctgcgttccatgaagcaggcgcgctatacaccggaaaatgcagggcacttcggtctggcggcgcagtattatacacattttacgtctccgatccggcggtatccggatctgcagatccacaggatcattaaggagaatctgcgcggcagactaagtgatgacagaatggcacattatgaaaagattctgcaggaggtggcaacacagtccagtgagatggagcgcagagcagaagaggctgaacgtgagaccgtaaaattaaagaaagtagaatatatgcaggatcggatcggagaggaattcgaaggtgtgatctccggtattacaaaatggggagcatacgtggaactgccgaatacgatagaaggtcttgtacatgtggtgaatatgaaggacgaccactatgagtaccgggaagagcagtatgaactggtgggagagcatttccgtaatgtctataaactgggacagagagtccgtgtgcgtgtccttggtgcagaccggctgcagagaacgattgattttgagttttgcgaagaaaacgagtagagtttaacgggaagaagagaggaaagtgcgatggcaaaaaaagaaggcaaattgatcgccaacaataaaaaagcatatcacgattattttattctggaaaaatatgaggcgggaatcgtactgcatggaacagaggtcaaatccctccgcatgggacagtgcagtatcaaggaagcgtttatccggatcgaaaacggggagatgtttatttatggaatgcatgtttctccttatgaaaagggaaatatctttaataaagatccgctgagaccgagaaagcttctgctccataaaaaggaaattgacaagattttcggcaagatgaaggaaaagggaaatacagtggttcccctccaggtgtacttcaatggaagtcttgtaaaagtggaagttggacttgcgaaaggtaagaaattgtacgataagcgggatgatatcgcgaaaaaagaccagaaaagagaagcgcagagagaatttaaaatcagaaatctgtaagaaatatgccatcgggcggaagttattcttccagtccgatggcatgtttgatttctgagagattctctccagtaaagaccattccattcatcccgagcttctgagcagctttgatgttttcgggtttgtcatccataaaaaagcagtcggacggattcagtgaaaaggtatcaaacagatgctggtaaatatccggatttggtttgaattttttgatggatccggaatagactgcaccgtcaaataagcgggtaatctcgaaaaaatctgcatgttcttcaaagaaaatcggagcgttggaaagaatgtaaagccctgtgtgctgttcttttaatctgtggatcatatcccacaccggctgaatcgggatcatgtgttgataccaggtggcaaagcatttgcgggcagtgtcatgaaggcagtccggcagcaggtgaagtgtttcctcctggtattcttcatagggaatacttccctcatccaatgcctgccagttgtggtagatggcatttttcagaatgggaagatcttcgcgattgcagtaggagcgcaataagtcatctgattgaaaggtagcaaggacatttccgaaatcaaagataatatgtttataattcataagtaaaatcctttctgaagcgtatttgaaactctgtttatcatagcacagaacaggagaaaattcatctatggatcttatgagaaaggaagtgtgcttttgagaaaaatgtggtaaaatggataaaagcatatttttctaacattcatttgattccacatgtgtaatgtggaatatcttattcatttcaaaaacaggcaaacgcctgtcctttcagaaaattcatgcttttcaaatcaagcaggcaggagttttcggaaggcgaaatctcctgaaagaaaaaaagaaggaggttttgtatggaaatgcaaaaagaagaagcaaaaatgcttcagtggcatcctgcatttttcgcagagatacagatcgaactgcaggaagatgccgaacatctgatttttgagaatgaacatcagctggggaccaaaccaaaagaaatctatgttctgatcatcaaaaaggacaagggtcgggtgatccgaaagaatatcgggcggattttccgacaacataatatcgtggaatataaaagtcccctggattatctgagtattgacgatttttataaggtgtatgggtatacctgtttttacaaatccgataccagtcagatggacagcattccgatagaagaacttacgattactctggtaacaggaaaatatccacgaaaattgatgcaccacttgaaaacaaaactgagatatcaagtaaaaaaagcggaaagcgggatttattatgtaacgggagataaaattccgattcagattattgtaacaaaagaactgacagaagctgaaaatctgtggctgaaaagtctgaccaatgaactggaacagaatgagaccgcagaaaaattattggaagaatattcaaaaaatcaggcaaatgcactgtatcgctccgtcatggaattgatcgtgcgggccaacaaacagaagtttgaggaggtaaaaggaatgtgtgatgcactgcgggaattgatgaaagatgagattgatgcggaagtgaacaagcgcttggaaataactaaaaaggagagctctgaagcagtagaaaaacgaatcaatgctctgaatctggcgctttctaaggcagaccggatagctgatattataaaggcagcagaagatcacgattatcagcagaaattattcgaggaatttggtctgtagaggagagaaaaatgaagtacaatcatgagctgatcgtgccggatgaggggctgcccttcaagatgtttatttttgagggcaaggatggcaattataagcgtgagacgcactggcatcgttctgtggagatttttgcggtctgtgatgggaaactttgtttttatatcaaagagaagccgtatcctcttgtgcagggagaatttatgatcgtgaattccaacgaagttcattccgtgcattctccaaagccgaaccagacgattgtattgcagataccgatccggttgtttgagaattattttacgggagaaggattcatctggtttacacacaatccggtggatcgggatgaacggctgatggagttgatccgccagatgtatgaggtgtacataaaaaaagagcgtggctatgaaatggaagtgaaaggtctgttttatcttgtgatgcatttgctggtatctgagtatcagcggattgatgtgaccgaggcgcagcttcgggacaataaaaatctgaaccgtctttctacgattacatcctatattaaagaaaattatgcatcagaaatgacactggagagtctggcgaagatttttggatattctccgacctatctttcaaggatgtttcagaaatatgcgggggtaaattttaaagcctatctgcaggatatccggttgagatatgcatggaaggaagtcaaagacagtgataagaccttaagtgagatcgctatggagaatggttttccaaacagcaaggcgctcgccagatcatttcagaaaaaatacgggatgcttccaagcgaatatcgaaaaagagagaagtgactgttcacaataacaaagagcaagaaattgacataaaatagataaataataggtcgcagaagcgaaaaaaagttgataaaatgacctcaatgggaaacttggagacaggtttttgattggaggtcattttttatggaaattcagaaagttacagataccgcatttgccaaatatggaaaagtgatgtcagatattccggtagagcggatcttaaaagagatggaacacacgccgcttccggaagatgtgatttatgttccgtctgtggaagcgttggaagtacttccggatgcggtggcagtcagagaaaaaggatttggagggctgccgattcagattgggtattgtaatgggagcaatgtgaagttgaatgcactggagtatcacagatcctcagagattgatatcgcagtgacagatttgatcctgctgcttggatgtcagcaggacatcaaagaagatacctatgatacagctctcgtggaggcgtttttcgtaccggcaggaacggcagtggaattgtatgcgactacgttacattatgcaccatgtaatgcaaaagcaggcggtttccgatgtgtggttgtacttccgaagggaacgaatgaggcacttccgtttgcaccggaagcaaagggcgagagcagacttttgacagcagtgaacaagtggctgatcgcgcacgaagacgcagagattgagggtgcggtgaacggcttaaaaggtgaaaatattacaattgtgtaaaaataaaaagcaaatagaaaggatggtaacagtatgagtaacatgccagaattaaaaatcggagtcgttgcagtgagcagagattgttttccggagagtctttccgtgacaagaagggaaaatctgatcaaagcatataaagaaaaatatggagaggcggatatttatgagtgtccgatctgtatcgtggaaagtgagatccacatggtgcaggcactggaggacattaaaaatgcaggatgtaatgcacttgttgtgtatcttggaaacttcggaccggagatcgcagagacattgcttgcaaaacattttgacggaccgaagatgtttatcgcagcagcagaagagcgcggagacaacctggttcagggaagaggcgatgcttactgtggtatgctcaatgcaagctataatctgaaacttagaaatgtaaaggcctacattccggagtatccggtaggaaatgcagaggaatgtgcggacatgatcgcagagtttcgtccgatcgcaagagctgtcatcggactgaacagcttaaagatcatcagctttggaccgcgtccgttaaatttcctcgcatgtaatgcaccgatccagcagttgtacaatctgggagttgagatcgaagaaaactcagagctggatttatttgaggcattccataaacatgatagagatgaaagaattccggaaatcgtaaaagagatggaagaagaactgggagcgggcaataagaaacctgagatcctcgcgaaactggcacagtatgaactgaccttgaaagactgggtagaagagcacagaggatacagaaaatatgtagcaatcgcaggaaaatgctggccggcgttccagacacagttcggatttgttccatgttatgtcaacagccgtctgacagcacagggaattccggtatcctgtgaagtagatatctacggtgcactgagcgaatttatcggaacagttgtcagtgaagatactgtgacacttctggatatcaacaatacagtaccgaatgacatgtacaaagaagatatcgaaggcaagttcccatatacacagaaagatacatttatgggattccactgtggaaacacagcgtcctccaagctgtcattctgtgagatgaaataccagatgatcatggcgagagcgcttccggaagaggtgacacagggaactctggaaggagacatcatccctggagatattacattcttccgtctgcagagtacggcagactgcaagctgcgcgcttatattgcacagggagaagtacttccggtgccgacacgctcctttggatccattggaattttcgcaattccggagatgggaagattttaccgtcatgttctgatcgaaggcaattatccgcatcacggagcagttgcatttggaaaatggggcaaggcattgtttgaagtattcaaatatatcggagtggatgtcagtgagatcggatataatcagccaaaaggtgtcagatatccaacggaaaatccttggaatgagtagagtgggaggaagcgtatgttatacataggtgtggatcttggaacatcagcagtgaaattgctgctgatggatgagaacggcaatattcacaaaattgtatccagagagtatccgctgtatttcccacatccgggctggtcagaacagaaacctgaggactggtttgcccagagtatggaaggaatccgtgaactgacagcagagtgtgacaaaagtcaggtcagaggaatcagttttggcggtcagatgcatggtctggtggtactcgatgaggcggaccatgtgcttcgtccggcaatcctctggaatgacggacgaacagaggaagagacggattatttaaatcaggtgatcggcaaggaaacactgtccaaatatacagccaatattgcatttgccgggttcacggctccaaagatcctgtggatgaaaaatcatgaaccggagttgtatgaaaagatcgcaaagatcatgctgccaaaagattatctggcatataagctgtccggtactttttgtaccgaatattcggacgcatcggggatgctgcttttagatgtacagaataaatgctggtcaaaagagatgttggatatctgcggaatcagggaagagcagctgccaaagctttatgaaagttatgaagtggttggcaatctgaaaccggaaattgcagaagaactgggacttggcacagatgtaaaagtcattgcaggcgccggggacaatgcggctgcggcagtgggaaccggaacagtaggagacggtcagtgcaatatttctcttggaacttccggtacaatctttatatcaagcaagacgttcggtgtggatcagtacaatgcgctgcattcatttgcacatgcagacggcaattatcatctgatgggatgtatgctcagtgcggcatcctgcaataaatggtggatggatgaaattttaaagacaaaagagtatgcaaaagagcaggaagatatcgtaaagctgggtgaaaatcaggtgttctatctgccttatctgatgggagagagatccccgcataatgatccgtctgcaagagctgcatttatcgggatgtccatggatactacacgtgaagagatgacgcaggcagtacttgaaggcgttgcattcggacttcgcgattctctggaagtggcgagaaatcttggaattcagattgaacgcacgaaaatatgcggaggcggagcaaagagtctgctctggaaaaagatcattgcaaatgtgatgaatctgaaagtcgatgtgatcgaaagtgaggaaggtcccggatacggtgctgcgattctggcagcagtcggatgcggagaatttgaaaatgtggaaagcgctgtggataaactggtccatgtggtggaaactgtagagccggacgcagaacttgtggaaaagtatgaagaacgctaccagaaattcaaaaaatactatccggcattaaaaggattgttttaattgtgaagaaaatggtacatgctagaaagtggatagttctaaacaggggcaagtatgactcatgcgagtcgctttgcccctgtaatttttctataaaaagaaaaagatagataacaactgctatcttacgagaaaattcttaatcattcagaaatatcttgcaggagtttttaaaaaagttttttccgaaaaacaatggtttcatattggcgaatattaccgttcttatttccgtagatgatatcccccttttttggcagtactatgttgatattgcggtatgagaaattttgtataaagatatattcgtattcatcatctgtccgacttgttacctcaatcccatcaggaattgtatttagaatagaatgaatatgatgtttagctaaaattttggcataaaaatcatggtaaaaaagttcttctgcgtcggtacagatgtagtaagcatatcccttaccatactgattgacggtcagtgcaggtgtgccttgataaaaatcacttccataattcatgagtggtgtggcaccattgagttgaactaaatcacaaagatttttgcatttataggaagtatgcagttgcaaagagttttcagggattagaataagcgaattctcttcccattcatagagtccatcaatttctttgcttctaagtccaaatacatcgagtaagctatgtggagttccctcaaggtagcacagatccgtttcatttacgattccactccagtatgtcatgattagtatcccaccattttcaacgaaagtacgcaattttgtttcgataccagatcgaaacatatataacattggtgcaaccacaagtttataagaatcaagggattgctccatgttaatgatatccacattgagtgctgcttttcgaagcgcctggtaggattttaagacactttcatggtaaaaaagtccttcatttcggggacctttcgcgtcttccattgcccatctgttttccatgtcataaataatagcagcggatgaatctactttgcttccaataacttgttttaattctatgagggatgcaccagtttcagttacttcgttgaaaacgcgtgtatcagatccaccataatgatcaatgaccgctccatggaatttttcgaaacttccacgactttgtctgatctggaaatattgtacgctgtccgaaccatgtgcaattgcttgtagagaagcagattgtaacaatcccggtttttttagtttacttattgcttgccagtttggactggaggggcaggattccattaaaagaaatggcttctgtttcatactccgcatgaggtcatgctgcagtgctgtattgtatgctgtacgaatttcgtcttctttattccatgcaggatagctgtcccaagatacataatcgatgtgctttgccagattgtagtagtttaagcccttataatcatccataaaattagttgtaacgggctgagttgcaccaccatctcgcagagcatgtatctcttcgcacataaaatcaactgtctgatctgttacaaatcgtttccaatcaagattgaggccgtgtagtccgtggtctcctatggaagatggactttcaatttgatggaatgaattataggtatggctccaaaaggttgtccaccatgcccggttcaagctgttaatatctttatatttgttttttaaccagttgcgaaaagcttcttgacataatggacagtggcattcacctctgtattcattggaaatatgccacaggattactcccggatgatttcgaaatgttttagccaacttttggttgatgattcgaacacgttctctgtaagcaggtgaggtgtagcaatgattatgccgctccccgtatagttggcgtgtacgatcttcacggacacggagaacttcggggtatgtttctgccaaccaacgcggacgggctccagatggtgtggcaagtatgacctggatgccgttgtcgtagagtttgtcaattatgtcaatcagccaggtgaaattaaaacaatcttttattggttctaaagtagaccaggagaaaacacccagtgttacagtatttatgtgtgcctttttcataagaagtaaatcctgttttaggatatcgggtctatccaaccactgttctggattataatcacccccatagataaatttatcaatatttaaatcattttggatcattcttcttatcccttctatcagtagtaataaatttgttataaaatgcagtttaaaagttttcctaaatttacgcaataataaatataaaattaggcggttacatttttgcacagcgaactggcaaaaaaatgaatttttaaaattcacaagttggtgtagaatgagggcatgagaaagaggaaggagagtaaggatgagacccaagtatcatatttcaccggaacaaggttttttgaatgatccaaatggtctggcacaatttcgtggaaagtatcatgtgttttaccagtggctgccagatgttgttccacaggggagtaaacaatggcgacattgcatttcaaatgatctggtgcattggacggacgaagggagcgcactacagcctgatgagtggtatgaaaaaaatggttgctattcaggctcaggtattacaacagaagataagtattttctgttctatacaggtaatgtaagggatgctgaaggggggagagaaacatatcaatgtgttgctgtatctgacgatgggaagtcttttcagaaagaaggtcctgtgatctatctgcctgatggatatactgcacattttcgagatccgaaagtatggaagaaaaataacagctggtggatggttgtaggagcacagacaaaagaattgaaaggcaatgtggcaatatttgagtcgaatgacctgaaaaaatgggattaccggggaaatctgctggatacttcgatggactgggggtatatgtgcgaatgtcctgatgtaatggatatagaacaacaatttctggtagtcagttgtcagaaagaaaccgggtgtaaaggaatcgtttttagtggaaggatggactacgctgaagcaaaatttcaattacaggatgaggggaatttgctggatgaaggattagatttctatgcgccacagagttttgtagatgaatcaggacgatgcattttaattggatggcttggtgcaggtgagttggagtatcagatgagtcagcctacggtagaagaggggtggctgcatgcactgacaattccaagagagttgtttatacagaatggaaaacttcatcagaggccggttaaggaattcgagcgtatcagaagacatgagcgggtgatcgaagcagaaggatacactttcattgatcaggaaacatggagcgtggaattactggcagagcagttatccagtcaaaaaatttcttttaattttgggaatgtattgaaaatttattttgataataaaaatttgcttattcaaagaaaacattggaatatgaaaggatatgatgaagtacaagtggagatttctgagcttgaaaatatccaggtgtttttagatcagtctacagcagaaatttttgtgaataatggagaaaaagtatttacattcaaagctttctttacagatgagaaagggattgaaattgaatctgaacaaacaattttgtaaaattttatatctaatttttgattatccgtataaacactatactttcaaatattttgaagtatagaaaagcactcattttaccacgaatttaccataattaaacgagccttgatatgactataaataacactaaaaagacatcattgacacctaaacggtgtcttttttaaaagcagtcaatcataagaccaactgctttgtaaatatagatattaaattgttaagctgagattttacttagatttatctttcactggtttgctattttcatcattttctccttcaagccatgccattatgccaaagttacaaaatggataaattattacttctttataaacttcttgctcacaacgagggcagatgacatattcttcactttttacattttttaattaccgaaatgcccttttttatttgcaaattacatgtcttatagcttaccatgtttttcgtatcttgcgactcttgatattttgttatcctcatctacaaatactactttaggtggatttttctttacctcttctggagtcatctgtgcatagcacattatgattatcttatcacctgtctgaacacatcttgcagcagctccattgagacatatcattccgctgcctctttctcctgcaattgtgtatgtctcaaatctgttcccattatttatatctacgatacttaccttttcatactccaaaattccggcactgtcaagtaagtcttcgtctacagtgatgcttcctacataatcaagttctgcttgaactactgtagctctgtgtatcttcccctttaacatttcaaatgtcatatttaacccccgtttaaccttcgtaaataaagttgtcaatcaatctggttttgccgatataaactgccatggcaactagtactggtgctgtcatctccttgaccggtttaactgaaacagcgtctacagcctgaacataatctattttcgccataggctcagtttcaataagcttaatcatttctgatacaattttatctgtatctttttctcctgcttttgccatatcttctccgagcttaactgctttgcttaaaattagtgccgcctttctctcatctttgcttagatatgtatttcttgaactctttgcaagaccatcctcttctctaactatagggcagcccacaatttcgatatcaaagttcaaatctctaaccattctttttataatcgcaagctgctgtgcatccttttgaccaaagtaagctctgtcgggatttacaatattaaaaagtttagatactactgtgcctacacccctgaaatgtattggtcgtgattttccacaaagttcctctgaaagactttctatgtttacatatgttgaaaaatcgtcaaaatacatattttccggctcaggattaaatattaaattagcacctgcctcctcacatagcatagtatccctttccaaatccctcggatagctttccaaatcttcccctactccaaattgagtcggatttacaaaatcactgacaacaactctatcgttttctgaaacagcccttgtaattaaactcttatgtccttcgtgcaaaaatcccatagtaggaacaagacctactgtaagaccttctttcttccattctttgactataactctcacttcatctacggtttttactattttcatcgttctatctcctaatataacttgttaattacatcttctgaaattttaaatgtgtgttcaggtgctggaaagcttccctgtttagtttcttctatatatgcagcaaaggcttctttcattacatctcctacctttgcgaattgttttacgaatttaggtgtaaagtcagagaccattccaagcatgtcctgataaacgagaatctgtccatcgcagccagatcctgcacctattcctattgtaggaatattaatgctttcagaaataatttccgctaattttgcaggtacgcattccaaaacaatcgcaaatgctcctgcttcttcaacagcttttgcctcttcaatgagtttctttgctccctcttcactttttccctgaactttaaagcctccaaaaacgttcactgactgaggtgtaagtccaatatgtgccataacaggaatagaagcagctgtaatagctttaatctgtggacaaacagaggctccaccttctagctttactgcttgacatcttccttctttcataagtcttcctgcgttatacatggcctcttcaattgaaacttgatatgacataaacggcatatctccaactactaaggcatctttggcacctcttgtaactgctcttgtatggtgaatcatatcttccattgttaccggcaaagtattttcgtatccgagcataaccatgccaagagaatctccaacgagaataccgttaatacctgactgatccatcaatttagctgtcgaatagtcataggctgtcagcattgtaatcttatcgcccttaaccttctgttctttaaaagtggatactgtgtttttcatttttaattacctccgtcatcttcaaatagtcactgtctaaatgtttttcctgtgcaatactgagaagcttttctgaaagcaaaagatatatcatctcatatcccaccttttcctcagactcgtttatccatgctgcctcaatagcttcaatgtgttttgtgatagtcgacaaatcatttcgctcaacaggacctgtgagggcagccgcaactcctttttctgccaatgtgtcggcatttccagtaaacaaaggcactaaggctttctttgcatcttttttatcaaagccgcattttacaagcatttcagcccccacttgaaaaagtccgtttacgagattgcttacaactactgcaccgcagtggtaaagagatttattttccgctcccattgcgattaccttatttcctgctcgctcaaagatactcttaatctcatctagattctctgccgaaccctccacagtaaaataagccttattcaagtgtttccatgattcgcacttatcacttattgcatataggggatgtaccgaatagatatttgcaccgaggttttcaccatcaaaaaaaacggtagatgaaatcgaaccgctgcaatgacaaatatttttatttttaatatccagattcttcatataatcccatactttgcttatttgtccatcaggcacagtaataaacagggtatcactgtcacttaagatattctctatactcttatatagttttgtgttagtaaaatctgctgctgatttagctgattccggtgatttgctgaagtaacctgtaatctctacgccgttttccttcaggtattttccaagggaaaatcctactttccccgctccgataaatcctgctctcatatcgatcactcctttctgggaagtgacaatcatgaaaatctgcatggctgaggtctcgttcaaactgatacaatcctcatggcttaaaaataaaaaatatgtggtatagtttctgttcgaatactatctacccattactatagcacctatttaagtgattgtacagagaaaaaaacaaggcaccactctaactaatttatcattaaagtgatgctaatataaatcgtgttatttagcttttctgtatttaatcattttcacaatctgaattatcaaagtcgggataaaaatataaagcatgacaaaacacttcttcatttttcgcttgattacccaccacagaaaagaaagaaccctgtaaagagccttaccaccattggtggtgctttgcactcttgattgggctttttgtttgctgtatctttcatgcaagaggaaaattaaagccctctattccatttctctgaagatttggaaaggaaaggtgagtaatgatggaacagaccatgaattatgtaaaaccggaactgattgttgtagcagtagtactgtattttattggaatgggattaaaacagtctcagacagtaaaggataagtacatcccacttattttaggcggtattggcattgtattgtgtgcagtgtgggtgattgcatcttgcccgatcagtaccggacaggagattgcaatggcggtatttacagcaatcgtacaggggattttagtggctggtctgagtacatatgtgaatcaggcaattaagcagatgcataaggaagaataaaatagattgaaccatgaagaaaagcatggtatgataaaaaacagaacaaccgtgttacagggtggctgacctctattctacatagaatggggtggtgctgatggacaagaaaccgtttgattttaaagaccttatggcatttggaatgttcattctggcattgctgacattcgtatttacgtttatcagataatgttttgagcatagaaaaaccaccctctaaactttgaccgagtgccgagggtggcaattctatgatttgtcactaatgctatgaggtcaaccccttgtgggcggttgttcctttgaatataatataccatttttaacaaggttattcaagaaaaaagtgaaagtgggtggtttgcatggcagtattaaaagcgtcagataattccgaaatgattatttcttgtaaatgtggatgtgatgatgggcttaggatcaaaatagaaaaagatgaagaagattattgttttatgacttatttaagcggaaactggtataaggagcaggcgggatttattaaaaagttaaagaaaatttgggctatcatacggaataaggatttttattattctgaaattatactcaataagaaagattgggaagagtataaaaagtggatcaatgaaaaatgaaaaaatattatcaagagggcttggaaacaggctctcttttattgcacaacaggaggtgagaacatgagagaacagaacgaattcggaagaataacagcggaagaactggaaaaagcatttgaaacggaagaacaggaggaagagaaagaatgaaaattggcttaaggggagggcattccccaaattgtaaaggtgcaataggtctgatcgatgaacaggcggaagtgcggaagatctacaacgaacttgtaccgatgctacaggcagtcggacatactgtgattgattgtaattccaacgcatcgaatgtgtctggtgagttgtctgacggcacaaataaggcgaatggagcaggatgcgatatctatgtcactctgcacatgaacgccgcaggagcggcatcagcagggggcacagaggtgtggttatatgatgcatctaaccagaccatgaacacgatcgcaagcaacatctgtaataattttgcaggaaaaggatttactaaccgtggtgtaaagtacagttcgggataccatgatctgaatgcatctaatatgcctggcatgatcgtagagacattattttgcaccggcacagatgatgtagcacggtatcgtagtttaggcacaaaaggaattgcggagccgattgcaaaggcaatcgacagtagagcgtctgcatgcagcgaacaaaaaaataaccagaatacaggaatcgaacaggaaggagaagaagagatgaaatgtttatttacagtagagggaaaaggtgcagtgtattattttgacggtcaaaaagtaataacattgggtcatccagacgaattaaaaatcatccagcagatttacaaggacaacaatggtaaggacatgccgtgttacaagtggagtcctaaagcgccatggtatgcaaggctcatgtcggtaatttacagtaaagagaccacatctatttaataaaaatcccctcggagatcgttctctgaggggtgaatattgtatcatctttcgtgttgcatatcgtgttgcatatcagtgtaaaatgcaacacaaattataaaatattatattttttataaaatagtatatccgataaagccaataaaaaagggaatctgcgatttctcgccgttcccttcaaaatggacctggcgggagtcgaacccgcgtccaaaagcctatcccatgtacttctactatcatagtcagttctttttgattcccccgactgcacgaaaacggacatccttacagcttcggtagcttcatgatacgcctgacagctcaaagctttgctgccatcgtttctcacaaaagtcgatgccagattctcaaggtgtgagtgccctgaggctgacaagcagcaactaggctgctaacgcgtaattttcgtctgcgtttaattttaagtttgcgatttgacgcatctgcctgcggatagcttctccatcttcaagacccctgtcgaaaccagtacaagccctgaatcatacggtttatcaccgttctacttataatataggagaatctgataaaaagtcaaggggaaacttgtaacagatttggatttttcgtttattttctggaaaattgtgataagatataaaataggttttgaaaaaacaaaagcagcgggagttttgattgaagaaaggggagagcatatgccgacaacgtatacacattatcgatttggaaaagatgttctggatgcacttccgagaagaatccggacggcaatggagacaaacagagaattatttgacatcggtctgcacggaccggatattttgttttattatagagcgctgattcccaattctgtgagcggacagggatatggaatgcataagcagatggcggatttgttctttgaaagggcgaaaaaggtaatcgccgatgcagatgacaaaactatgagcagggcttatatctatggctttatctgccattttgcgctggacagtgagtgtcatccttatgtagaaaagatgatccagaaaagtggaatcggtcattcagagattgagatggagtttgatcgttatctgttgacagaggacaaatttgatcctttgacttacaggcagacggagcatattcacgctactgagaaaaatgcaaaggtagtcgcgccgttttttgatcatgtgactgcccagcaggcgagaaaagcactgaaagggatgcagttgtgccataaagcgttgtatgcaccgggaaaaacaaagagaaatctgttgtttggagcaatgaagacagcaggacagtatgacaagttccatgggctggtgatgagtgaagaaccgaatccaaaatgcagggaatactgtctgttattgaataaattgtatgagggtgcaatccctgtggcagtagatttgatcatgaagtatcagaattatctgcttggaaccggtgatcttccgaaacggtttcactgtacgttcggggcaggtgacaagtgggaggaactggtgctgtgagaaagaaggcatggacgtttggcattctgacaggactgctgttgtctgtgctctgcccgtttacagtacaagctcagattgcatcaccgcaggcgtttcaaaatctgtcctggaagatggtgaaggaagagtcgatcgaaacagaacatggagtagtacagtccatatgtgcgacagacgattacatcgtttgtctggaaaacgtgctggatggaagtggacagccggatattgtaaaggcatactatcgcaatgacaaggataaaaacggcaatccggtcgagcagtattcccttgcaatgcaggtacaggagacagattatgaacatgccaatggaatggcatataatccgaataccaatgagatcgcggtcagtctttataccagttatcagaaggaaaacagaggatgtctttttatcatggatgcagatacactgaaattcaagcgcaaggtgaaagtgacagattcctataatatcctgggaatcggttatgattcggcaaatgacaggtatgtgatccagacaaatgcagatggaggatatcagtttaagattttaaataatgagtttcaggtcacagaagacctgggagatctgggcggttatgcaggggatggaaattatcaggatctgtgcgtgacagaagattatgttttgaattttcctctgacactgttctcgggaaatggtgattttctgaatgtatactctctttctgaaaagaaactgctgtattatgaaaagctggattttcagtttgaggataatgtcaccagtgatgagccggaatcaatctgcgagttagatccgggagtctttctggcggttgtgaatgtcacattatctgacgggacaaagaaggtcagattgtacaggatggaagtgccttaccagtatgaggttgaagtaaaggttcaggttggggaggacaagccgtcagtttccaggaaaacagtgctgcgcggagaagcatttgaggcagattatccggagaaagaaggatacagaatcgcttcagttaagattgataaaaaagagatcgatctggaaaagtatcaaagcaaatatactttgaaatccgtacagggggcacatacgatttctatcgtttatgaaaagaaactcgcaatgtggaagatcatactgcctgtttgtgtcggagtggtacttttgtcagcgggctttgtcttttacttaagagtcctgcagatacggcggatccgcaggcgcaaactggaagcggaaaaacgccgcagagcgcgaatcaaatggcacaacgacgagtggaatatcgacgaaatttattgaattttcagaaacagttcataaaaaaagaactgtttctttttttgcctcatgctataataaagcggaaaggatgggtaatgtatggacacatttgtaaagttggaaaatattacaaagatttatcatatgggagaagtagagatccgggcagtagacggaatcgatttctcgatacaaaaaggtgaatttgtagtgattgtaggcccaagtggggcaggaaagacgacggttttgaatatacttggcgggatggatactgccagtggcggtcggatcacagtggacggtcaggatattacaaagtacagtgagaggcagctgacgggataccggcgggacgatatcgggtttgtgtttcagttttataatctgatcccgaatctgactgctctggagaatgtagagatggcgcttcagatctgccgaaatccgctggatgcaagagcagtattaaaagaagtcggactggaggagcgaatggacaatttcccggcacagctttccgggggagagcagcagagagtttctatcgcaagagctctggctaaaaatccaaagcttcttctatgtgatgagcccaccggagcgctggattataataccggaaaggcgatcctgaagcttttgcaggagatgtgcagggaaaagggaatgacggtgatcgtgatcacacacaactcggcactggcaccgatggccgaccgtctgatcaagatcaaaaacggaaaagtatccagtatgaaagtaaacgagaatccgatatccatagatgagattgagtggtagggggatgagatgagaaaaaaagcactgcgaaaagatttttatatggaaatacgaaagagcttcggaagatttctctccatttttttcattgttgccataggaactgcgtttttttcgggaatccgggcagcggaaccggatatgcgcttatcgggagacgcgtattttgaccaaagtaagctgatggatctgcaggtaatcagtacgatggggctgacagcggatgacttgcaggcgatacgggagatcaagggagtggaacaggcacagcctgtctattccatggatgcattgtgtgatgtggacggcagtcagaaggtcgtacatattttttcctctcaggatgggataaatgagctgaaggtagaaaaggggcgtatgcccgagaaagcggacgagtgcgtggcagatgcagattttctggcatccagcggatatcagatcggagataaaatcacatttctgaaggatgaggatacagaagtgacagaagaactgacacagagcacctttcagatcgtgggaagtgtgagcagtccggagtacatttccttttccagaggaagcagtatgatcggaaacggaagtgtcagtggttttatatcagtacttccggaaagctttcagatggatgcgtatacagaaatttcgattcaggtgaaaggcgcaaaagaagagactgcttttacaaaagagtatgataatctggtggatgagacaaaaaagaaggtggaagcgatccagtcggagcgtgaggatatccgtcgggaagagctgatgcagcagatggatcagaagcaggcagaattactggcagaagttccatcggaggcgatggaaattgcagcacctcagctccaacagcagatcgagcagcaaaagacaagcctggaacagggaaagtggtatgtaaatgacagggaagatctgacagagtacagtggatacggagagaatgccgaccgaatgcgggccatcgggagagtatttcctgttttattctttttagttgcggcgttgatcagtctgacttctatgacgcgtatggtggaagagcagaggactcagatcggaacactcaaagcgctgggatattccaggcgctccattgccggaaaatatttgggatatgcattctgggcgacagtgggaggctgtgtgttcggtgtgctgattggagaaaaaatccttccttatatcattgtgacagcttatggaattatgtatcctcatatgaatacggttgtgatcccatataacctttattatggagtttccgcgtcactgacggctctgttgtgtacgatgggagcgacattgttctcttgctataaagaattgagggaacaggcagcagaattgatgcgtccgcctgccccgaaaaaaggaaaacgagtatttctggagaagattccatccttgtggagccagttcaattttatctggaaggcaacaatccggaatctgctgcgttataagaagcggttttttatgacagtgtttggaattggcgggtgtatggctctgcttttagtgggatttggcctgcgggattctattgttgatattgcgaagcttcagtatcatgaacttcagctctatgatgccaatattattttaaataccagcgccagtaagcaggagcagaataatgtggaacaggagttgtactggaatgatcaggtagataagactgcggtgggatatcttggtcagatgaaggtaaaacatgggaacgaagaacaggaagtatatctgaatgttccggaagatctgcaggactttgaagaaatggtagtatttcgtgatcgcagatcttatacacagtatgatctggagacggaaggggtaatccttacagagaagacagcgaaacttctggaagtaaaggaaggggatacgatcacgctctgccagacaggaaaagaagatgtcaaagtaaaggtcggaaagatctgcgaaaattatatcgggcactatctgtatatgagtcctgaaatataccagtctttgtatggggaagagccgcagtataacagtgtgtatttccagatgaaaaaaggatatgaagatcagctggagattttgggagaggatatcttgaaaggagaaggagcactgaatatcagctatacagattccattgaagatcagctggatgacatgcttggaagtctggatattgtaatggcagtgctggctatttcggcagggcttttggcatttgtcgtattgtataacctcaacagtatcaacattacagagagaagaagagaactggcaacattgaaggtacttggattttatgataatgaagtatcggcatatgtatacagggaaaatatgatactgactgtaatcggcggcgttgccggtattattctcggaagtattctgcaccggtttgtgatcgtgacagtagaagtagattctgcgatgttcggacgcagtattgaaatgtccagttatggatacagttttctgattacacttgcattttctgtatttgtaaatcttgtcatgtattttaaactcaaaaagattgatatggtggagtcattaaagagtgtagaataaattcagaaatttcacagtacggacataaatctttgatatgatgaagctaaagagtggttgctgttcacagtaacaaagagtggcaagatgaggagtgaggaaaagatggataagacgaaaattttagtagtagatgatgagagcaggatgagaaagctggtaaaggattttcttgtgaggcagggatataccgtgttagaggccgcagacggcatggaggcaatggactatttttatgaggataaagatattgcgctgatcattttagatgtgatgatgccgaagatggatggatggcaggtttgtcgggagatccgtatgcattcaaaggtgccgatcatcatgctgacggcaagatcggaagagcgggatgagctgcagggatttgatctgggagtggacgaatatatttccaagccgttcagtccgaaaatcctggtagccagagtagaagcaatccttcgaaggacgcagggaagcggaaacacagatgagatttcagccggcggaatcgtggtggacaaagcggcacatacagtgatgagtgatggatcaccggtagatctgagttttaaagagttcgagcttttgacatattttatcgagaatcagggaattgcactttccagagaaaagattctgaataatgtgtggaattacgactatttcggggatgccagaacgattgatacccatgtcaaaaaactcaggagcaagctgggggacaagggagaatatatcaagaccatctgggggatgggctataagtttgaggtagagtaatgaaacattcgatcaaaaggcagatgaccgtagtattcagcggactgatcatttttattctggtcatgatgtttctcgtatattccaagtgtctggagacatactacatcatgcataaggagagggaccttctggaagtgcataagacagtaggaacggcactggcacagggaaatagggaagatgagcgcgcgtggaaagtgatggagcgtacgaatatatccatgcttgtcttacaggataatcaggtgattttctcgccgagaggagatcaggaacagcttgtcagccagctgcgcggatatgtatttaatcagaatcaggatgaaggagagcttctgaaaagtacggacaactatgaaatacgaaagatcagagatccggtagcaggaattgactatctggaaatgtggggaacctattctaaaggagcgatctttattctgaggagtccattggacagtatctgggagagcacggcgcttgcaaacaagctgctggtctatgtcggaattgcggcactggtgctgggaggaattctggtatctttgtttgcgagaaagattacagagccgatcacacagcttgcttccctttccagacggatgtcagagctggattttgacgcaaggtacaccggaggtggagaggatgagatcggaacgctcgggaataatttcaatattatgtccgagcgtctggagaagacagtttcggaactgaagcgcgccaataatgagttgatgaaggatattgagaagaaagaaaaaatggaagatatgcggaatgaatttctgggcaatgtttcccatgagttaaaaacgccgatcgctttaatccagggatatgcagaaggattgaaagaaggcgtcagtgatgatccggaaagccgggagttttattgtgatgtgattatggatgaagcttccaagatgaatctcatggtcaagaatcttctgacgctgaatcagcttgagtttggaaatgatgaagttatattcgaacgttttgatgtctccaaactgatccagggtgtgatccagagctgtgagatcctgatccagcaggccgatgcgaagattgattttatcggtgagagtccggtttatgtgtgggcagatgagttcaaaacagagcaggtgatccgcaattatctcaccaatgcgatccaccatgtggacaatgagcgcagaatcgaagtccgtgtcctgtcaaaagatgacattgttcgggtgacggtgttcaacagtggtcatccgatccctcaggaggatcttgcaaagttgtgggacaagttctacaaagtagacaaagcacataccagagagtatggcggtaacggaatcggactgtcgatcgtcaaagcaatcatggagtccttccatcagaaatacggggtcagaaactttgacaatggtgtggaattctggtttgagctggacgggaaatcagctttacatgaagaacaaaatgcgataaaataatctgcaaatgcaggcatacaacgtgccaactggaaacaggaggtgttttgtatgccttttttcataggaaagaacgttcagatgaaaggagcacatacatgacagtaattatcgattatggcgcaggaaatatcaaaagtgtagaaaaagcactgctctctctcggacaggaggtcgtgatcacagatgatgcagatacgattttaaatgccgaaaggatcatacttcccggtgtcggcgcgtttggcaacgcgatggcacagcttgaaaaaaccggactggatgaagtgatccgcgaagctgtaagaagaaaaatcccgtttcttggaatctgtcttggtcttcagctcttgtttgaaaagagtgatgaagctttgggagtgaaaggccttggggttttaaaaggggaagtgaagaagattccggcaaaaaaaggattgaagattcctcatatgggatggaattctctgcattttgcgcataatggaaagctgtttcagggaatcgaagagggcgcatatgtttattttgtgcactcttattacctggaagcagaagaagagtcgatcgtgaaagcttctgccgaatatggggtacatatccatgcttccgtggaaaaagaaaatgtatttgcctgtcagtttcatccggaaaaaagcggtgagacaggtctgaagatcctgaaaaattttacagaactgtaagggggaagaggcgatgtttacgaagagaattatcccatgtctggatgtaaataacggacgagttgtaaaaggcgtgaattttgtggatttaaaggatgccggggatccggtagagattgcgaaagcgtatgacgcggcaggtgcagatgaacttgtgtttctggatattaccgcatcttctgacgggcgcgggacagtgatcgatatggtacgggaagtggcaaagtgtgtgtttattccgtttacagtcggcgggggaatccgcacagtggaagattttaaagcactgcttcgcgagggggcagacaagatttccattaattcttctgcgatcgccaatccgcagctgatccgggatgcagcggataaatttggcagccagtgtgtagtggtggcgatcgatgccagaaagagagaggatagaagcggctggaatatttataagaacggcggacgcgtggatgtcgggatcgatgccattgaatgggcgaaaaaggtggaaagtctgggcgcaggagaaattcttcttacaagtatggactgtgacgggacaaaagcaggatacgatttggagctgaccaaagcggtggcagagagcgtgtccattccggtgattgcatccggcggtgcggggaccgtggagcatttcaaagaggcgctgacagacggcggcgcagacgcagcactggcggcatcattgttccactataaggaactggagatccggcaggtcaaagaatatttgagagatcaggggatttccgtcagactaatatagaacaaaagagaggaagtgaacatcatgtctggaatcaatggagactggtatgaagcattaaagggggaatttaagaaaccttattataaaacattatttaatacggtcaatgaggagtatcggaccagacagatttttccgccggcgaatgatattttcaatgcgtttcatctgacacctttaaaagatgtgaaggtagtgattctggggcaggacccgtaccacaatttcaatcaggcgcacgggctgtgcttctcggtgaaaaagggagtgcaggtgcctccgtctctggttaatatttataaagagctgcaggatgatctgggctgtaccattccgaaccacgggtgtttgacaaaatgggccgagcagggagtactgatgctcaacacggtgctgactgtacgggcgcatcaggcgaattctcacagaggaatcggctgggaggagtttacagatgcagcgatcatggcagtcaacgcacaggaccgtccggtcgtattcatcttatggggagcgccggcacagcggaaaaaacgaatgctcaataattcgaagcatttgatacttgaagcgccgcatccaagcccgttgtctgcataccggggatttttcggaagcaggccgtttagccagaccaatcattttctggaagaacatggcgttacaccaatcgactggcagattgagtagggctgtcaggaattcagatatagctgattcatatgatgcgaaatggttgcagttgtcaaggagagcctttttgccagatcactctggtaagtgggttcttttttattacaatcttaagaaaattttaataatttaccaagcagaaatttttaaattcttttatataatgtagtgcattgggaggaggtatggtgtgaaaaagatcattgaagtaaagaatttatacaaactgtataagcttggagattctgcagtgcgagcactcaacggagtcagtctggagatttatgagggtgaattctgtgccattgtaggtacttccggctcaggaaaatcgacgatgctgaatatgctggcaggtctggaaaaacccacaaaaggagaagtcattatagacggacagcatattgagaatttaaaagaagatcagcttgtcagattcaggagagaaaaagtaggatttatctttcagtcttttcagcttttaggcagtatgaatgcgctggaaaatgtggcgcttcctttgagtttccgcggtgtgccgaaagcccaacgcctgaaaaaagcggataagatgctggatctggtcaagctgaaaaagcataaaaagcatctgccaaaccagatgtccggaggacagcagcagagagtcggtgtggcaagagcactggtggtagatccgaagatcatttttgcagatgagccgacaggaaatctggattcccgtacatcccgggaagtcatggcgctgatgcagcaggtggtcagagagcagaagaaaacactggtcatggtaacccatgatgatcatcttgcgggatatgcagatcgcatcttccatattatagacgggaaaatcgtcaaagtagaagacaatagaaaaaaagcaggggaacatgcagagcagggaggaaatgagcaatgagacgatggaaacaggcaatgggagtgatcgtaagttttgcactggtggcggcaatgctgcttccgatgagtgcactggcaagagagcaggcgattcccacgatacgactgacactcggaaacggacagacaacaccacagtatgcagcaggagagacaagtgaactgttgattcgggtctggaacaagggaacacaggatgcggggaatgtaaagatttctccggtacttgatgatggggcgagctggccgtttgaaatcgccgatatgaacaacgaactggagctgggaacaatcccggcgggacagtacgcagaagcagtctggaaagatttaaaggtacgcgatgatgtggagacaaaatcatacaaactggcgtttacagtgacttatgatgatggtgagaaccaattccagagtacaccgtacatctttgcgaagacaacggcaaagccggaggaaaaagcagatgacaataataacaataacaatgcacagccggaaacaccgcaggagccacagggcggcggggaaagtctggctggtggagtgacaaacacggatccgatcatctccggaggaggaagtggcggtggaacttctactgcttcagtaccgcgagtgatcgtgacagggtttaatacagatccgggcgatgtcaatgcgggaagcaactttaaactgatcattcatttgaagaatacatcttccacgacagcggtttccaatatgctgtttgatcttcaggcaccggcttccggaacagacgcagcagcagaggcgccggcatttttgcctgcatccggttccagctcgatttatctggatggaatcccggcaggagggacaaaagatatttccattgatctgaatgcaagagcagatcttgtgcagaaaccatacagtattgcgatgtccatgaaatatgaggacggcaatgccacacagtttgaaagtgcttccagtctggcaatcccggtaaagcaggcagccagatttgaattgagtgacattgaagtggcaccggaatccgttgctgttggagaagaagcaaatattacctgcagtctttacaataccggacgaatcaagctttacaatgtaaaagccaaatttgaaggggaaggtctgacaggaaaagaagtatttgtaggaaatatagagccgggggcaacaggttctattgacggaatcgtaacagcaaatcaggagatggatgagacgaaaaagtgtaaagtcgtgatttcttatgaagatgaagccggaaagagtgcgagtatggagaaagaatttcctctgacagtaacacctgcacagaatcctgcggatatgatgccggtggaggcagaagcaccggaaaaaggacttccggttgttccgatcgtgatcgcggttgttgtggtggcaggaattgttacagttgtgctgctgctcagacataagaagaaaaaaatggcggctttggaagaggaggacttgctgaatgaggtggatcgatttactgaggatgagtagcaacagtctgaaacgaagaaaacttcggacgtttttgacagtgctgggtgttgtcattggtactgcatctatcgtagtcatgatctcgctggggcttggacttcaggaatcgatgtatcaggaaattgagcaatccggaggtgttacaagtctgacagtgacaggaaaaggttcttcccagatgggcggtttctatatgggggataccaacaacgaagaggaagcgaccaaatatacaacagatgatgtgatcgaacagattaaaaagctggatcatgtggcagacgtgcagccggttttgtcaattgatgcacttttaaagaaaaacggatatatcggatactgtcctctgacaggtatgacagaggaagggctgaaagatctgaacatcaagctggcaccgggcggaagccttccgaaagcaggcagtgcggaactggatctggttatcggaaataatgtcattacaaacttttcagaagaatcaacaggaaagatgtattgggagacaggagtgcttccggatatagatctggctcatgattcattgtttttgatcctggatcaggagggatataattcgagtcagtcgccttctacgggagggacaacagcggagagcagcggagacggcaagacacagaagagcacaaagccgccgaaaaagtatgtcgtgcgggcaagcggcatggtggaaggggatgtggatacatacaatgcaaattcctattctgtgtattgtaacctcgagacattgaaaagtatgctgaaaaaggagttcagcggcagagcgattccgggacagccgactacaaaatccggaaaaccatataaggattttgtatattcctcactgaaagtcaaggcagatgacattgacaatgtagacgcactgtccacagaaatccgaaatatgggattccaggtgactacaaatgtggagtatatggacagcatgaaaaaacagtttgcaatggtgcaggcggttcttggtggaatcggtgccgtgtcactgtttgtagcggcgatcggaattgccaatacaatgatgatgtccatttatgagagaacaaaagaaatcggtgtgatcaaggtattgggatgcagcctgcgcaatatcaagcagatgtttctgttagaggcagcgtttatcggatttatcggcggactggtcggaaatatcttaagttttttgatctcttttgtgatcaatgcgatcgtggccagcagcggggcaatgggagtggaaggaaatatttcctatattccgctctggctggcagcggcatccatgatttttgcagtatttgtggggatggcggcaggttatttcccggcacttcgggcaatgcggctgagcccattggcagcaatccataacgaataaaggcaaattattaattcaaatatttcgctattgcagaggatgtattttttatgtgcgaagtttgagtataagaaaagcaggaatcagtgcagttcctgctttttgaaatcataagtttcgggatatttctctgatatgcggaaggtaatcggaatcaaggcggctaaatactctgccagaatttcccgacagccccttttacgtaataagaaacgatggagttttcaaggggaaaatgaatttcaactttctctttttaaataatcgtgctataatgcagaaaagcataaaaattctggttttctaagcggaaccataccgcatcttttattctaagtcatatcggaaaatctctatgctttgatttcaatctaaaacagcagagaggtttgagggaaagatgccgtattggaaagcctcctgcagctattttcattcaaggaggtatttatatgaaccagacaacaccaacacagcctgtaaacagactgtacaaatcgaggatttttgccatgctctacagtgacaggaaagatctgctcgatctgtacaatgcggtcagtggaaaacattatgaagatccggaattgttggaaatcaatacactggaaaatgcaatctacatgtcgatgcataatgatctgtcctttctcattgattccagactttccctgtatgagcatcagtccacctacagtcccaacctgcccctgcggtatttgttttatatctcggatctgtattccgggatgacaaaagatgaaaacctgtatggtacgaaatgcattcagatcccgactccgcagtttgtgatcttttacaatggaagtcaggaacagccggatcgaaaaattttaagattgtctgatgcgtattgcgtcaaagaagaacatccggcattggagctgactgcggtgatgctgaacattaaccgcgggcataatgaaaagttgaagggaatgtgcaaatctctgaaggattactcagaatatacagcaagagtgcgggagtacgcccaggtaaagccggtggaagaagcagtggaacaggcaatcagtgagtgtattcaggaagggatcatggcagagtttttgaaacaaaacagagcggaggcgaaacaagtgagtatttatgaatacgatgaggaaaagcatatgcgacaggagcgggaagcgtcctgggaagagggcagagaggttggaagagaagagggacgagaagaaggacgagtacaagggagagaagagggaaaattcgaagggaaaattgagcttcttagaatgcagattcaaaagaaactggtaaaaggaaaatctgtttctgagatttcagaggaacttgaagaagaggaagatgttattgcacaaatgatccgagagatgggagaagagagggcagcggacaagcatctgcccccaaaactttcccattgagtttacctgacgatgatccagtctataccctgaaaaaagtgatggaggagttagaatatacatcgaaaagaaaaaatacaaatctcctgtagaagatcaggtgtcaaaacactgattactacaggagatttgtattttaagatttagagcctaaaaattggcattaaccgacagcccctttctttggattttgattatagcgtatataggtatggattttcaagcactgtggataaagaaaaccgatggtatgaaagtggttgacatgagtattctaaagtcatagaatataaatatgaaaaagcgtacgattttatgtacggaaatgaggtggaattatgttggcggtgaaaagtatggatgtaagagggcattttaaagagtggtgtgataaggttttcagcggtgagacattgattatctcacgtcctaagaatgaaaatatcgtaatgatttcagaaacagagtataatgaaatgatgagaataaaacgaaatgtagagtatcttacacgtattgacaaaagtttggaggaattaaatgcaggaaaaacaatgtcattttcattggaagaattaacagaaatggaatcagagaatggatgaagctaacaggcttgtttatcagatagatgaattacaaaatataaaagtcatatcatgcagaggacactatgaagagtgatattgagaatagactaaaaaaggagaaaaacaatgtttcgattatgggcaaaagaatttaaagacaaccggatgctgcgggacacggtgatctgcgatgattcggatgagacacgcacacataaaattttcaatgcgctggaggaaatctgctatgagtttgatctcagcaagccgatctggttggatgtgacgattgcagaatttaagaagcatgcaaaggcaagattttatcaggataattttgtggattccattgattttgattatctggagatccagatcattgaggagtagcatatgaataagaatacattcagcaatcgggtaacatggtacaattttatactctgtatttttgttgtttggattcatgcacagaatacggatctgtttacagaagtggtaatgatagagggaaagccgttgtttaatcagattgagcagacgatcgtttcggatatcgcagtggtcggtgtggcaggattttttctgtgttccggatacctgttttacagaaattattcctgggggaaagtgctggaaaaatataagacgcggtttgtggggctgtttatcccgtatgtgatctggacactgctttactatttcattcatgtaggggtgtcctatatcacacctttgcgggctgtgttcaatgaaccaccgatcacagtaacctggaaggggatcgtggatgcggtactcaattacagatactgcgcatttttatggtttttacagtttctgatcctgcttgtggtgctctcccctcttatttatctgctgatcagcaataaatatatggggatcgtggcgatcgttctggtgcttgtcattgacagtaccggtatctgtggagatctggcattcggaagtgtacaggcgcaggcattttgcaactggctgtttatttatatgaccgggggatatatcggaattcatggaagtggtgcagtagaaagtaaaaacacaagctggctgctgcttttggcgagcgtgattcttgcggttctggcgtattattttttcaaatattcgccgagtatgttcaccaatctgatgtatcttctgttgtttgcggctgccttgtggtgccttgtctgcaagctgccgcttccgatggcggcaaactggcagaagcatacatttattgtatacatgacgcattttctgatcgtgcgtgggatgaacgtgttggtgagtaagtatctttccgcatctatgtggccgggaatccttttgtttttcctgcttccggtgctttgctttgcgctgacatcactgttttggcggatttgtggaaaaggccagtccttcgtgtggaaaatgttgtccggaaaccgatagagtgtggaaaactgattacttatgccggtaataaaatacagcgacctgtgttctgtcacgcagatccagtttatcgaggatggaactcaggtaattccggacggttccttcactgagaaacaggcgagaagcaatttctttgttactgagaccgtcagcgatcaggcgtatgatctcaagctcccgttcgctgatgtcgtagtcttccaggtggaatgtcggaccggtttgaagaagctcgggaatcttggaaatgatttcatttccgaaaacagtctgtccggagtgaaccgcgtgcagtgccgggatgaggctttcgtaatcctgtttgaggagatagcctttcgcaccaagttttaatgcccttacaatatactcatcatcggagaacgtggtgagaagaagaattttcgcatcgggaaattcttttaatatctcagcggatgcgtcaagtccgctgagttctttcattctgatgtccataagaagtacatcaggtctgtatgttctgaataatcttactgcgtcttttccgtccgtgcctgtggcggaaacggtaatatcaccgctggcttccagaatggttttcagtgcgccggagacaaaaatatcatcatcaataattacaatattcataaccttaatactcctgttcttttgggatagtgataaaaaggcggaagcctttttgtattgtgatctgcaggtttccgttcaggattttgagccggtcgttcatattggaaagaccgatccctctgcttgagaataatgcttcccggttgttttctgagagggaaagcccttcttccagggtgccattgtcttcgatacaaagctgatacagtgcagggtgttcccgcatggtaatctgtaccagagtggcattgctgtgcctggccacgttggaaagcgcttcttttataatgctgataaaacaatatttaatttccctcggaacttcaaagcccatgtcataatgcagagttacgggacagaatgtaaaatctgaggtcaggctttcggctgcttctttcagattcagtgactcgtcatgaaggtcatggacgctggagcggatgctcgtcattgcctgattcagagaatggtccagattatccagaaccggcgaaagtgcatcggaagcattgagggccttggcggcgcctgttatcaggatggagcgggagagcagatgcccgacattgtcatgaatttctctggcaatccggtttcgttctttcagcgtggctgcataaatttcgtaatcctgtttttccgcaagcatccggtttttttcttccagaaggagatttttttcggtgctgtcatctcttagtttcatgagccgttgttccagacattctgcggcttctgtgcggttttgcagacggaaagccaggagaaacaagaagattccccagaaggaaaaaagaggaatttgttttccttctgaccagatgccgtaaaagtaaagaacgctgcatacaagagccggaacatgatattgatccagaaggagtacataaaatactgcggggaaaaacagaaacagctccgggatcagaaaagcggccgctataaaagcggtacacagaaccaggtgaagcctttttgactgtgcaaaataactggtacagcacaaacacaggcacaggagaaaggcgcatacaaaaaaataatccagttttctgaaaaaaaggaaaaagaagccggacaatatgaataatccagtattttcaagatggcgcatcgtacaattcctcccggtaaacagatttatctttggatatcctcagtataatacaaaatcaggatccgggcaaaggaaaaggcaaaaggaaagacggaaagtgacatttgtcatgtggggaaatgacagcgttcactaccggatggaaagcgggcagtttataatttgggtatcagctgtaggaaaagaacagcgttcgatcaaacaaggaggagacatatatgggtggaacagagcgttttcaggaaaatggaatcatacagatagaaaatcttgtaaaaagatacggttcttttgttgccctggatcatttgaatctgaatgttcgggaaggggaaattttcggacttctgggaccaaacggatcgggtaaaacaacggtgatcaactgtatgctggcacttttgaaatatgataaaggcagtatacggatattcggtcaggagatggcaccggatcattatgaggtgaaaaagcagatagggatcatacttcagaatgtggcggtttttgatgaactgacagtatatgagaatattgattatttctgcggactttatgtaaaagagaaagaaaaaagaaaaagtcttgtaaaagaggcgattgcttttgtagggctggaggactaccaaaagacaagaccaaagaagctctccggcggactcttaagaaggctgaatattgcctgtggcattgcacacaagcccagattgattattctggatgaacctacagtggctgtggatccgcagagcagaaaccggattctggaaggaattcaggagctgaacagacagggagcaaccattgtttatacctctcattatatggaagaggtggagcagatctgcagcaggattgcgatcatggatcatggaaggagtattgctgttggcaccaaagaacagcttaccgggatgatcaaaacaggggaaaaggtgacgatcgaggcggtcgtactaagtgaggagcagcttgcaggaatcagagagctgccgcatgtattcgctgttgattatcaaaatgacattcttactgtacagtgtacggaagccagacataaccttgtgcggatccttcactgtctggaggagcaggggactgcttttggaagagtctactcagagctgccgactctgaatgatgtatttcttgagattacaggaaagcagcttcgcgattagagggggggagagagatgtttcatttgataaaatacagtgtgatcagaaaagtaaagaatttcagtatgttattttggccctgcatgtttccgctgattctcggaacgctgttttattttgcattcgggaacatttcagagtcagattttgaaactgttcaggctgcttttgtggaagagaatccgggagattcagtatttccgtcattcctggaagaagtcagcaaagaagaaactttgatccatgtggaaacaatgacagaaaaagaagcgttgcagaagcttgaggatcagaaaatctccggaattttttatggaacagaaacgccttatctgaaggtgggaaaaaacggacttgctcagagtattatgcaaagtcttctggagagctatctaaatggaaaggatacgctggaaacagtggcagatgtacatcctgaaaatatgaaaaaggcggttgccgcgatgtcggactatcaggaactggtagagaatgtttccgcaggcggcagaacgaccaacgggaacatggaattcttttatgcgctggctgcgatggcgtgcatgtacggctgttttatcggtcttggttctgcgatgtggctgcaggcaaacctgagtactttggctgcgagacaatgtgtatctccggtacacagactgaagatgatacttacggagctgatctcttcttttatacttcattttttaaatgtggtgattttaattgtttactgcaaatatgtacttcagatggaatttcagggaagtatgggaaaaatgctgctgattgtggcggcaggctgtgtaatcggagtgagtatgggaattctggtgtgcagtatcggcaagttcagcgaggggatcaaggttggaatcatgcttgggatttctatgacaaccagtgtgctggctggtcttgtgaatgtacagataaaacatgccgttgaccgtgcattgccccttgtaaacaaactgaatccggcggcagtaatttcagatgctttttactgtattaatgtgtacgacgatccggtacgattcagaaatgacattcttacattatttatcatgtgtacagtaattcttgcagtttcatttgtggttgtcaggagggaacgttatgacagtatttaaaggatacatgaagattatcggtcagaacagaatgttgatactgctatatgttgctatttttttcggatgtacgcttctgtttcagtccacagcgggaaagtcagaaacaagttatcaggcggaaaagctgaatattggaattgtcgatgaggatggaggaagtcttgcagagtctctgacagagtatcttggaaatctgcatcatctgattcctgtagaaaatgacgtttctgagatacaggaaaagctgtattacagagaagtgtattatgtggtcagaattccggagaatttttatgagaaatgtatcaagggagacgaaaaactttctgtgacaaaaattccggatacatattcgggcagttatgtggatcagcagatcaacagctttctgaataatgccagaacgtatcaggcagcaggatttacggaggcggaagcagcgagtgctcttgagaggacacaaagcgtgaaggtaacctttttaaaggatgggaaaaacacagaagatgctccgtatgtatattattttcggtatatgccgtatctgtttctggcattatctggatttgtgatgggtaatattctgattgtttttcataatccagatctgaaaaaaaggatggcggcatctcctgtttccggaagaagacaaagtctggaggggattttgtgcatgagcctggcagggattgcgctgtggatctttgtaattgtaattgcgattgtattttttggaaaagatttttatacatcaggaaattttgcatattacctgttgaattcggtattcatgcttttcgtagcgattgcgctggcatatctgatgggaacaattgcaccgaacagagacgcgttgaccggaattgcgaatatcatttctctgggaatgtgctttctgggaggtgcgtttgtgcctcttgagttcatgggaaatgatgtaaaagctgtgagtcagttccttccggtatactggtatgagaaagcaaatgatattcttgctgatttcggacatctgacagcttctgcaaaaggacagttcttgcaggcgattatgatacagcttgttttcgcagcagcatttgtctgcctggtactggtggttgaaaaatataaaagagtggattcatagcaggatgcggactgtgactgtggtggagcgactgcgggaagtggagaattaggaaaaaaccaacttgacaaacaggaattgtcagtgtaaaatgcaaaacatatcagacaaaggcgtcttttacgtatatttttacgtgaagggggcctttttttgttgtgataagagaatctgattacaggaggggcttgattatgtgttcaattataggatattgcggtatttgcgatgatctggatgagtttcagaaaggatttgataaaacgatttccagaggaccggatgacagcaggattgtagataccggaaatggtctgcttggattccacagacttgcgatcatggggcttacggcatccgggatgcagccgttttcactgggtggcagttatgtggtatgcaatggagagattttcggatttgagcgtttgagagaaagcctttccgacagatatacgtttcagagtgattcggactgcgaagtgcttctgccgctctatgagacatatggcacagaaatgtttcgtatgctggatgcggagtttgcctgcatcatctatgacggaaaaacacagggatatattgcggcaagagatccgatcggtatccgcccgctctattatggatatgataagaagggaatcatcgtatttgcaagtgaagccaaaaatctgatcgggctgtgtgaaaaaatccgtccgtttccgccggggcattattataaagacggagaatttgtctgctactgcgatattacaaaggtggatgagatctgtcaggatgatctggagcaggtgtgtgccaatattcgggagaaactggtgaccgggatcgaaaagcggctggtggcagatgcgaaagtcggatttcttctctccggagggctggattcgtcgcttgtgtgcgcagtggcagcgagaaagagtaaaactccgatccgtacatttgcaattgggatgcaaaaagatgccatcgatttgaaatacgcaaaagaggtggcagattacatcggaagtgagcatacagaagtaatcattacaaaagaggatgtgctctcggcactggaggatgtgatcggacttttgggaacgttcgatattacaacgatccgtgccagcatagggatgtatcttgtctgcaaagccattcatgagcagacggatatccgggttcttctgaccggagaaatttcagatgaactgtttggatacaaatatacggattttgcaccgtcggcgcaggcatttcagaaagaatcagaaaagcgggtcagagagctgcatatgtacgatgtccttcgggcagaccggtgtatttccgtaaattctctggaagccagagtgccatttggagatctggactttgtccggtatgtgatggcaatcgatccggagaaaaagcagaatgtgtatcggaaaggaaaatatttgctccgccatgcgtttgagaaaggggactatctgccggaacatattctctggagagaaaaggcagcattttcggatgcggtgggacattctatggtagacgacctgaaagagtacgctgatacctgctacacagaggaagcgtttgaaaaggaacgtcaaaaatatacttatgcacagccgtttacaaaagagtctcttttgtatcgggagatttttgaaaaatattatccgggacaggcggaaatgatcgcaggcttctggatgccgaatcaggagtgggagggctgtgatgtgacagatccatctgcacgcgtactggcgaactatggcgccagcggagagtaaaaggtgtgaacagaaaaataaacagagaggaataggatagaatgaaaaattacatggaacaagagacaaaaagtctgtatcgggaacaatttgagcatgataactgtggaatcggcgcggtagtaaacagcaaagggatcaaaagtcacaaaaccgtggaaaacgcgctgaagattgtagaaaacctggaacacagagcgggaaaggatgccgaagggaaaaccggagatggtgtcggaattctgcttcagatctctcataagttttttcagaaggtctgtaaagagctggggatcagcctgggagaagaaagagagtacgggatcgcgcagtttttcttcccgcaggaagaattacagcgcaatcaggcaaagaagatgtttgagatcattgtagaaaaagaagggctggaacttcttggatttcgtgaggttccggtgcatccggaggtgctgggagaaaaggcaagaagttgtatgccgcacattgttcaggcattcatcaaaaagccggagcatgtggagaaaggactggagttcgagaggaagctttatattgcccgccgggtgtttgagcagagtaatgacaacacctatgtggtatccatgtccagcagaacgatcgtatacaaaggaatgtttttagtgggacagcttcggacattttttgcggatcttcaggatccggattatgagtctgcgatcgcactggtacattcccgtttcagtacgaatacaaatccaagctgggagagagcgcatccgaaccgttttatggtacacaatggagagatcaatacgatccgcggaaatgcagacaagatgctggcaagagaggaaactatggaatccggtgccttgaaaggagagcttcacaagattcttccggttgtagataccagaggatctgactcttccatgctggataacacgctggaattcctggtgatgagcggaatggagcttccgctggcgatgatgatcgcaattccggagccatggagcaaaaatgccacactttctcaggatgtcagggatttttatcagtactatgcgactatgatggagccatgggacggtcctgcttccatcgtgttctcagacggagatatcatgggagcggttctggatcgaaacggtctgcgtccgtcccgttattatgtgatgaaaaacggagatttgatcctggcttccgaagtcggagttctggatgtgccggaggaagaggtcgtgttaaaagaacgtctccatccgggaaaaatgctgttggtcgatacagtaaaaggcaaaatatatcaggacgaagagctgaaggaaatgtatacaacaaagcagccttacggagaatggctggacagcaatctggtggaactcaaagacttgaaaattccgaatatgcgtgtagaagagtacgagccggtaaagagaaaacagcttcagaaagcatttggatacacatacgaagaatatcgcaattccattcggaacatggcattaaacggaggcgaatccattgcggcaatgggtgtggacacaccgcttgcagtgctttctgataagagacgtccgttgtttgattattttaaacagctctttgcgcaggtgaccaatccgccgatcgatgcgatccgtgaggaaatcgtgacctgtacgactgtctatgcaggaaaacagggaaatcttctggaagaaaaagaagaaaactgccgggtattaaagatcaacaatccgatcctgacaaatacagatatgttgaagatcaaaaaaatgaaaaaagaaggattccgggttgcagttgttccgattacttattataaaagcacgaagctggagagagctctggagcgcctgttcgtggaagttgacaaggcatataaagacggagcagacattctggtactgtctgaccgggatgtggatgaaaaccatatggcgatcccgtctcttctggcagtttctgcagtgcatcagcatctggtggcaacgaagaaacagacctcactttctctgatcctggagtcgggagaaccaagggaggttcatcactttgcgacactgctcggatatggagcgtgcgcagtgaatccgtatcttgcattggatacgatccatgagctgatcgaagaggagatgctggacaaggactactatgcggcagtggaggattatacactggcgatcctgcacggaatcgtgaagatttcatccaagatgggaatttccacgatccagtcttatcagggagcgaagatctttgaagcgattggaatttcaaaagaagtgacagacaaatatttcgcaggtacagtcagccgtgtgggcggtatcaccatggaggatatcgagaagcaggtagatgaataccatacaaaagcatttgatccgctgggactgacaacgaatctggcgctggagagtatgggaaaacacaagagacgtgcagatggtgaagaacaccgctataatccggagacgatccatttgctgcagcaggcgacctggaccgggaattatgaattgtttaaagagtatacgaaaaagatcgatgcagaggagacgggatatctgagaagcctcatggattttgcctatgcagaaaaagagattccgctggatgaagtggagagtgtggaagatattgtgaagcgatttaagacaggagccatgtcctacggatccatttcacaggaagcgcatgagacactggcaatcgcgatgaatcatctgcatggaaaatccaactccggagaaggcggagagagtgacgagcgcctggattccgcaaatacagaaacagacagatgttctgccatcaaacaggttgcatccggaagatttggtgtgacaagccgttatctggtcagcgcaaaggaaatccagattaaactggcacagggcgcgaaaccgggtgaaggaggtcatctgccggggaaaaaggtgtatccgtgggtggcaaagacaagacattccacaccgggagtgagtctgatttctccgccgccgcatcacgacatttattcgatcgaagatctggcacagttgatctatgatttgaaaaatgcaaataaatactccagaatctctgtgaaactggtatcagaagcaggcgtcggaaccgtagcagcaggtgtggcaaaagcaggagcacaggtaattctgatttccggttacgacggcggtaccggtgctgctccggaaagttccatccacaatgcgggacttccgtgggaacttggtctggctgagactcatcagacactgatccagaacggactgcgtgaacgtgtgaagatcgaaacagacggaaaactgatgagcggaagagatgtggcgatcgcggcacttctgggagcggaagaattcggatttgcgacagctccgcttgtaacgcttggctgtgtgatgatgcgcgtatgtaatttggatacctgtccggtgggaattgctacacagaatccggaacttcgcaaacgtttccagggaaaaccggagtatgtagagaacttcatgcggtttgttgcccaggagctcagagaatatatggcgaaactcggagttcgtacggtagatgagatggtaggaagaacagacctcttaaagagaaatgaaacgaagcattcccggatggcagacaagatggatctgggtgagattctgtatcatccggcaaaagaaaatgtgacatttaaagaaggaaaagcctatgacttccagctggaaaaaacactggatgagagagttctgttaaagaaactgaaaactgcggtagaaaaaggaaacaaagcagttctggaaacagaggtgaaaaatatcgaccgttctgcaggtacgatcctcggcgcggagattacccgtttccacaaagaaggactgccggaagataccattgttgtaaactgcaagggagtcggcggacagagcttcggagcatttattccgaagggactgaccatgacactctgcggagataccaacgactattatggaaaaggactttccggtggaaaactggttgtatatccgccgaagaacagaggatataaagccgaggaaaatatcattgtcggaaacgtggcgctttacggtgcaacggcaggaaaagtgttcatcaacggtgttgcaggagagcgtttcgcagtccgcaattccggagcgtatgccgttgtagaaggggtaggtgagcacggatgtgaatatatgaccggcggacgtgtggcagtgcttggaaaaacaggaaagaactttgctgcgggaatgagcggaggaatcgcctacgttctggatgaaaacagtcatctttaccgcaatctgaacaaggccatgatcgcaattgaaaaagtggagaacaaatatgacatccaggagcttcgcgcaatgatcgaggagcatgtggaaaatacaggttctgcgcgcggaaaagagattcttgccgactttgatgcgtatctgcagaaatttaaaaagattattcctcatgattataagaagatgatcgcactggcttccaagtgggaagaacggggaatgagcagcgaacaggcacagatggaagcctttaatgagagttttcagatgaaagaaagtgaggtatagaaacaatgggaaaaccaacaggatttttagattacgaaagaaaaaatacaaaggcagaaacaccgcttcagagaatccgtcattttcatgagtttaaaacttcactgcctgtaaaagaacaacagaaacagggcggacgctgcatggactgcggcgtgccgttctgccagaacggcagcctgctcgcaggcatgacatccggatgtccgcttcacaatctggtgccggagaccaatgatctgatctatcgcgggaactggaaacaggcatatgagcgtctcgaaaagacacattgttttccggaatttaccggaagagtctgcccggcgctctgtgaggcggcatgtacctgtgccttgaacggagatccggtggcaattaaggacaacgagaaaatgatcattgaacatgcattccagaacggatgggtgacagcacagccgccgaaggtgcgtaccggaaagacggtggcagtgatcggaagcggaccggcaggtcttgctgcggcattactgctcaaccgaagagggcatcaggtgactgtatttgagcgaagcgacagaatcggaggacttctgtgctatggaattccgaatatgaaactggaaaaagacattgtagagagaagagtccggctgatgaaagaagaaggcgttctttttaaaaccggagtgaatgtaggaaaagatgtgactgcagcagagcttcaaaaacagttcgaccgggtgatcttagcctgcggagcatcgaatccgagagatatcgaggtgccgggaagagacagtaaaaatatttattttgctgtggatttcctgtcttcggtaacaaagagtctcctggatcaggatctgaaagagggcacttttatcccggcaaaagggaaacatgtgctggtgattggaggcggtgatacaggaaatgactgcgtggggaccgcgatccgactgggggccaaatcggttacacagctggagatgatgcccaagccttccaaagagagaacaaagtccaatccatggccgcagtggccgcgcacggagaagacggactatggtcaggaagaggccattgcagtctttggaaaagatccgagaatgtatcagacaacggtaaaggaattccagaaggacaaaaacggaaatgtcaaaaaagcagttctggtcagcctggagcctcaaaaagataaaaagacaggcagaatgcagatggttcccgttccgggcagtgaaaaagtggtggatgctaatctggtactgatcgccgcagggtttacgggcagccagaaatatgtaacagatgcatttggggtatctgtagatgcaagaacaaatgtagcgacaaaagaagaaacgtatgagaccaatgtaccgggggtatttgcagcaggagatgtgcgcagaggtcagtcgctggtcgtatgggcgatccaggaaggaaaacaggctgcaaaagcagtcgattattctttgatggggtatacaaatctgtaagagagaaatataataggatcatagtgtaagacaaggagaggatgttatggagaagtatagaaaaacagaaattctgcagatcgtggaggaagaaggcgttgagtttatccgtctgcagtttacggatatgttcggaaccttgaaaaatgtcgcagttccggtcagctgcctggaaaaagcaatggatgaccgctgcacgatcgacctggcttctttgaacggatttgcaaaagaagaggagacagagttgtatctcaagccggatttttctacgtttaccatactgccatggcgtcctcagaatggaaaagttgcccgttttctgtgtgatgtatgcacagaggatggcagcgaatacgaactgagcccgcggctgatcctgaaacgggcactggaaaaagcagaaaaacagggctatacactggaagtgaatccggagtgtgaatttttcctgttccatacagatgacgatggaatgccgactaccgtttcgcacgaaagagcagggtatctggatacgtcgccgatcgatctgggcgagaatacaagaagggacattattctgacactggaggagatgggatatcagattacatcttctcatcatgagattgcgccggcacagcatgagatcgactttgcgtttgaagatgcgctttccactgcagataaggtgatgacatttaaaatggcagtccgtacgattgcaaagcgctacggtcttcatgccacatttatgccgaaaccacggcaggatgtaaatggttccggtctgcatctgcacatgcggcttcttaagaacggcagaaatgtgtttaccggtgaaaacggtgaattgagcacagacggcgaagcatttctggcgggaattctgggacatgttgtggggatgacagcagtgtttaatccattggtcaattcttataagcgtctggttccgggatttgaggcaccttccgatgtgacctggtccagaacacagagaaatgcgctgctccatgtcagaaaacgcagaggagaaggcgtggatctggaactgagaagtccggattgtgcggcaaatccatatctgcttctggcactttgtctggaagcaggactggatggaatcaggaaacagcagaaagcgccaaaggaactgacagaagatatctgcagactgtccgatgaggagaaaaagcaacgaaaaattcagagccttccggaaaatctgggagtggcactggatgcaatggggcaggatctgttggtgcgggaagtgcttggagaatcctatgttgcggaatatcagaaaatgaaacgccgagaatggaaaaactatctggaacaggtaacaaagtgggaactggagcagtatctgtatctggtttaagaaaatcaatggaggccgcagatgggagtcatcgttgtcgtattaccaaagcttgagaatgcgaaaaaagtgaagaaaatactgcttgaacacggatttcagacggtgtttgcgtgttcttctgcctcttcggctcttcagatggttggtgaatattcgtatggtcttgtcatcagcgggtaccggatgccggatatgtattatctggatctggtagattgcctgccgcgggattttgaatccattctgttaggatccgaggagacggtggcacaagtcggtgcagggattttatccctgaccatgccgatcaaagcctatgatctggtcaataccgcagatatggtgcttcgtcagctggagcggcggatcaaaaagaaaacccggacacccaaaaaacggagtgagaaggaacagaattatatccgtaatgcaaaatttctgttgatggagagaaactatctgacagaggaggaagctcacaaatatctgcagaaatgcagtatggataatggaaccaatatggtggagacagcacagatgatcctgacgctgctgtttgatgagacataactggaaaatagtgaggaaaatagaatgccgaatttaaatgaaaattatttgaaactgcaggaaaattatcttttttcggagattgcacaccgtgttgctgcgtatacgaagcagcatccggaaaaaaatgtgatacgcctgggaatcggagatgtcacacgtcctctgtgtcagtgtgccggagaggcacttcttgaaggggcaaaagagatgatgtctgcggatacgtttaaaggatatggcccggagcaagggtatgaagataccagaaaagccattgtggactattacaaaagaagtggtgtagagatcaatgcgtctgccgtatttgtgtcagacggggcaaagagtgatacaggaaatatcacggatctgtttgcacacgataatgtgattctgatcccgacaccggtttatcctgtctatgtggactccaatgttatgtgcggaaataaagtggagtatattgagggaaatgcagacaatgacttccttccgatgccggactgggatcagcatgcggatatcatttatatctgttcgccaaacaatccgaccggcgcatgctataacaaaagccagttaaaagagtgggtggattatgcgcggaagaatcaggcagtgattctttttgatgcggcttatgaggcgtttgtgtctgatccggaacttccgagaagtatctatgccgtagaaggggcaaaacagtgcgcgattgagttctgttccctttccaaaacagcgggatttaccggaaccagatgtggatatacgatcgttccgcaggaactggtatttacagcgtccacaggagaagagatgtcgctcaatgccatgtggaacagacgtcagtgcacaaaatacaatggtacttcctatattgtacagaaagcggcagcggcagtgttcagtgaggaaggcatccgtcagtgtcaggagaatctggaatactacagggagaatgcgcgtgtcattacagatacactttcagatcttggcatccggttttatggaggggtacattccccgtatgtctggtttgaatgcccgaaggacatggattcctggacgttttttgactatctgctgcatgagatccaggtagtcggaacgcccggagccggatttggagagaatggaaaacgctatttccgtctgacctcatttggtacttacgagaatacagtagaggcaatgaaacgcttccggaatcttctggaaacaaaataaaaaacagaagttcgtgttctctgatcggaaaagttttctttcttaaaaaaacatgaagtttatgacagtaagagccaaatatggtatactaatagagactaagtgagaagggagattttccaagttgagaggagaacaccagatggaagacgcgatcaagaattatgaagacgtggacagttggaagaccgtcattttcttatataatgcagcaatgaaagaggtagggacgaagctggagattctcaatgatgagtttcagcacgtacataaatataatccgatcgagcatatcaagacaaggatcaagacgccggagagtatcgtaaaaaagctcaagcgatatggctatgagacctcgatcgagaatatgctccgctatatcaatgacattgcaggcgtacggctgatctgttcatttacttccgatatttaccgcctggcggagatgatcgggaatcaaagtgacttaaaagtgctggcaattaaggattacatcaaaaagccgaaagagagcggatataagagttaccatatgctggtttccgtgccgatctttctgtcggacagtgtggtagataccaaggtagagattcagatccgcaccattgcgatggatttctgggccagtcttgagcacaagatctattataagtttgaaggtgacgcaccggattatatcagtcgtgagctgcaggagtgtgcgcagatggtgtccgagctggatgataagatgctctctctgaatgaggcaatacaggcatgtctggaagtggagaatacgccggtacctgttgagctggtaaaggagaatcaggaacaggagaagaagcaggaagatatcgtagagcatattttgggaaaagaatcgtgatagaaaaacagccgtggctgccatgaaaagtggcagctacggctgttttttttgagtctgctttaagattttttcgtgcattacgaacataagaaccaagatgaaaagcagatataccgggaataaggctgggctgatcgtatttacgatccatccgaatacaggcggcataaggcaggttccgatataggcagacgccatttgtacgccgatcattgcctgggatcgatgtgcaccgaaatgctccggtgtggagtggatgatgcacggataaaccggggcgcatccaagtccgataaaaagcagtcctaaaagggcagttacttctccgatcggtaatagcaacaatatgatacctgataatatcacacattgtcccagccgtatcatctgagtgtcattgagttttagggttaaaaatccgctgagtgcccttcctgcagtgattccaatgaaaaacaggctggcaaatccggcggcagtttcagaagtcagcccccagtgtaaaaccagatagctgctgccccaaagtccggttgtctgttccagagcacagtaacagaaaaacgtgatcataatttcttttgcacctgaaatccgaacaatctgagagagagaaagcgcctgttcgtgatatgacgcagcagtatgactgcttttggtaggaacagttggctttttccaaaggggtaggctgaacagcagtacggccgtcagcaggatctgaagaatggaaatatagcggtatcccatattccagctgtgtccgtttgataatgcgtatcccataatatagggaccaagggaagctccgactccccacatacaatgcagccagctcatatggcggcttgtataatgaagcgcaacataattgttgagtgccgcatctacgcatccggcaccgagaccataaggaacggcccacagacaaagcgcgataaatgtatggcttgtggaaaatccgaatagtgcagctgcagtcatgaaaacactgacagcggtgatctttcctgcaccgaaacgtttagtcagacggtcgcttagcaggctggagatgatggttccgactgcaatgatcatggaaatcccgccggcataggaaacaggtacagaaaattcacgatacatcgtgggccaggctgagcctaaaagagaatccggcaatccaagactaataaatgccagataaataacagctaacaatagttgaaacatatataacctcctgcttgaatgttcttgtgtaataatatcgacatagcaagcttgatacaacttaatttccgacatataatataaaaaaaacgccaagtttgaaaaggagatgtgaatatggcactgcaggagtgcagattgaatctgaatcagaaattaaaagaactccggccgcatggaacgctggaatttccatgtgcggggtattcttcatactatacagggcggcaggaggacagcattccgtggcactggcatgaagagattgagatggtatatgttgcagaaggcaggttggaattaaaaataccatcggaatcgttttatgttgaaacaggagatgcgtttgtaatcaattccaatgtgctccactatgcgatcgctgcggattattgtaaactacattctctggtgtttcatcctacgcttattttaggaaatgaagattcggtttttgcaaaaaagtatgtacgtccgctcgtatcctgtcacgcattttccggctgtgcggtttcccggtttgagaatgcacatgtgattcagtggttttgcagtgcgtttgacgcgatcgtacaggaacctccgggatttgaatttgtcgttagggagaatttatctagagtttgttttttcctgacagaaaaatttaaagatgagctggaggtaccggagacacttcaaagtcaggacaatttgcggatacgaaaaatgttggagtatatccagagatattattttgatgatattaagctggcggatattgcgaaggcggcagacatcggagaaagagaatgtttgcgctgttttcagaagacaatacagctttcgcccatccagtatgttttgaagtacaggatcatacggggagcggaaatgcttttgcataatccggaaaacagcatttctgaaatagcaactgcctgtggttttgaaagtcccagtaatttttctaagatattcaaacggttttataagtgtacgccgagagagtatcggaaaaaagaaaatgattagtaaacaaaaatgcggtttactaaaattaaaaatgcattttggtaaactgaggtaaaaagtaaactatatataatatttatgaagtgggttttagaacccgattttatatgcataatacacaaaaaacatatcaataattcgttaataaattacaaaaacaagaaaagtgtacaagaaatatttgactttaggtaaaactggtttataatcaagttatagttaaccggttactaaaagcgagatgagtaagacagaagaaaaaggaaggaaaaggagaaaggcaaatgataggaattatcgttgcgggacatggaaattttccgacagggatcatgagcgcagtaagcctcattgcaggaaatcctgagcatataaaggcggtagattttgtgaagggaatgtcctcacaggaattaaaacagaagttagaagagcagatggaggcgctggggacttctgagatcctggtcatgacagatctgttgggaggaaccccgtttaatgtggcatccggcatcaaaacagagagtggaaaaagtatcaaagtgctggcaggaacgaacctggctatggcagtggaagcaatcttttctagagagctgatgggattggaagaactggcagaaattatcaggcagagcgcaaaagatggtgtggaggactttgacagtcttggaaatgatgatgagatgatatttgaagacggtgtctgatcgcaaagagggaaatcatgattaagaagataaatattgaagagattaaaaaacgagaagagtttttgtacggtaaactgttaacacgcaaagaggtagaatatgcgctggaagaggcaaaggcttctgtaaaaagaaacatggagtatctgaatggaaagtttccgttttcagcagcctataattctgagccgtttccatcagaacgggacggaatgtacccgattacagaaaatgtagagtggacgacgggattctggacaggactaatctggctgatgtatgactggagcagggaggaatgttttaaagaactcggaatggcagatgtaagatcgtttaaagaacgtgtagaaaaacggatcgatctgaaccatcatgatcttggatttctgtactctccatcttgtgtggcagcatatcagctctgccagtccgaggaaggaaagcaggcagcgcttcaggcagcggatattctgatggagcgttaccgggaaaacggacatttcattcaggcatggggaaatgtaggagatccgaaggactaccgtctgatcattgactgtatgctgaacattccactgttatactggaagagcagagtgacaggggatgagcggtatgaaaaggcggcaagagaacattttattacctcctgtaacaatgtagtgagggatgatgcatccgcttatcacacattttattttgatccggagacaggagaacctgttaaaggagtcacacgtcagggatattctgatgattcggcatgggcaagaggtcaggcgtggggaatctacggaatcgcattgaactacagaaattccaatattggggaagcgtttgatctgttcaagggaatgacaaattatttcctcaaccgacttccacaggataatgtatgctactgggatttgattttcggagacggttccggacagtccagggattcttcggcagcggcagtcgcagtatgcggaatgcaggagatgtgtaaatatctgccggagacagatgaggataaggaggtttataagtatgcaatgcatacgatcctgcgttcgctgattgaaaattatgccaaccattctcataaaccgggagaggcgcttcttttacatggagtctattcctggcattccggcaaagggatcgatgtaggaaatatctggggagactattattatgtagaagctctggtacggtttttgaaagactggaaggtatggtggtaaaataccgatttttatttatgggaggaaaagaaagatgacagacaaaccaaatatcgcagcgctgcgtattgatgagcgtcttgtccacggacagggacagctctggatcaaaacattaggagtcaacactgtgatcgttgcgaatgacgaggcggcaaatgatccgattcagcagacactgatgaaaacagtaattccgaaaacgattgcaatgagatttttcacagttcagcatacctgtgatgtgatttataaggcttctccgaaacaggtcatgttcatcatctgtaagtcggcagaagatgcactgaagctggtagagggaggtgttccggtgacagagatcaatgtgggaaatatccacagagcaccgggaaaacaggagatcagcccatacattgcacttggggaagaagacagggatgcgctccgaactctgaaagagaaatacaacgttacattcaatacaaaatcaacaccaacgggtgcggatacagcatccaatgttgatattacaaaatatttataggaacgaatatctataaggaggaagagaaatggaaattacaattgtacaggccgttttgatcggactttggacaggtgtctgccttagtggtatgcttttgggaatttacacgaaccgttgtctgatcatggctaccggagtaggtttgattttaggagatctgccgacaggactggcaatgggggcagtcggagagctggcatttatgggattcggagtatctcagggaggaagtgtaccgccgaacccgatggggcctggaatcataggaagtattatggcgatcacaatgaaaggcgcaggagtagatgttgcgacagcccttgcattatcgttcccgtttgcggttgcattccagtttgtaatcacacttgtttacacagcaatggcaggtgtcagcgccacagcgacaaaagcgctggaaaacaaacagtttaaaaaattcagactctgctgcaatctcaccgtttgggttttcctcgtgcttggctttgtgatcggatttgcaggtgcaatgagtgcagaaggtctggagaaagtgatcagtctgattccaacatggctgaatacggggctgagtgtagcaggagcaatgcttccggcaattggatttgccatgatcttaaatgtaatggcaaagaaagaactgatcccatttgtactgcttggatattgtgcgatcgcatactttaagctgccgatcatcggtgttgcgatccttggaacaacagttgcacttttggttcatttctatacaggaaaaggaaacaaatcaggtacagaaacagaagaagtggaggttgaatttgaagatggcatctaataaattacagaaaaaagattatacaagagcatcgctgagagcatacttccttcagaatggtatgaactacagtaactatcagggacttggatatgccaacatgctgtatccgggactgcgcaagatttatgacgatgatgatcagttaagagatgcactgaaagaaaatgtggaattcttcaatacaaacccaagtatggtaccattcatcggaaaccttcatcttgcgatgcttgatggcggagccaatgcaaaagaagtaaaatccattaaaatggcattgatgggaccaatggcaggaatcggagattcattgtctcagttctgtctggcaccgctgtttgcgacaatcggtgcgtcgcttgcacaggatggactgatcctgggacctgcaatcttctttctgggaatgaacatcactctgttgatcatcaaattattgatgggtaactggggacataagcttggggcaagtatcattgaaaagctgagcagctatatggaacagatttccacaattgcaggaatgatcggtgttacggtgatctccggtctggcagtgaattttgtgaagatttctacgaagctgcagtatgtggcacaggtttcggagacagaagagaagatcatttctctgcaggagatgttggatgcgatgcttcctaatatgcttgctgtattgtataccggcttgatgttctatctgatcaaaaagaaaaaatggagtacatacaaactggttatctttacgatcatcgtgggaatccttctttctgtgatcggtatacttggataaaatagaaaatgtattgaggatgtgggatgtttagcggaaataaacatcccataactggttttgtgaaacgggagatatagatatgggtttacagatagaacaattaaaaaatagagcgaaggaatatgcaaaagcatatcatgaaaaagaagtaaagcggagtgtacacaaaggagaaatggaagaaattctgcgccaggcagactggctgatggaacaaaaattttgcttttgtgaccgttgggatatggagccatgcagtacggtatatgaagtttcaccgttttcctgggatgcctgcccgaacggagattcggaatggatatatatgctcaacaggcaagagtatctgaaaaaaatgcttatggcatactggtacaccggacaggagcggtatgtggaagggatgaagcagtatattctgcactgggtaaggcaaaacacgaaggaaacattcggctctctgatgacaaggacgatcgacaccggaatccggtgcgcatcctggacaccattgcttctgcatcttcttgccaaggagcacatcaaagaagaggaactgtttgaaattttagaaagtatggaacagcagtttttatatctgtaccaaagctatgtgccgaaataccggcagagcaactggggtgttttacagacgacttcgattctgcagaatgcggcatggtttggagaatgtttctgtctggaagagatgaaacggatcgcagagtgggcaaaggatgagctgctttatcagctggaatctcagatttatggggacggctctcattgggagcagtccatgatgtaccatattgaagtgcttaattccgtaacgacaatgctggtgttcagaaaaagagcgggtgtggagacttcgaaaagaattgaggaaatcctgtatggaatgtacgattatgtgatgcatgcggcggggccggatcattttcagattgcgcagggagacagtgatgtgacggacatccgagatgtgatgacaagaggcgccatgctgtttgaagagagcgcatttaaatatgcgggatatgaggagccggatctggagagcatatggtgttttggaatggagcagaaagagcagtatctgaaactgaaatcaaaacagccggaaacattgaacggtctttatacagacagcggaaacttttattacagaagcggttgggagatagacagcaactatacgtatcttcataatgggccgcttggaagctcccatggacattcggaattgacacatatatgtaattattacaaaggaaaagcgtttctgacagacagcggccgatattcttatatagaaggagaactgagaaaccgtttgaaatctccggaggcacataatgtttctgtgattaaaggctgtccgatgggagtgccggacggttcctggagttacgcatattttgcagacagtctgaacaattactgcaaaacgattgaggggatccactatgcagagatgccgtatgtgatgcaaaataaacaaaaagagcctgcatactgctgcagaaggattctaatctttccggagggaatctggctgctcagtgatgaccttcgtatggcgggaacgcaggaaagtaccatgtatttccatctggcaccggaggtgattgtaaaggaacaaaaagagcgggaagttcttcttgaaaatgaagatgtcaggctgatccttggagcagagtatcctttggagcaaaggcaggagattttgtccagaatttataacgaaaatgaggagcatacagtttttcaggcaaaaaccaactgggaaaatgaaggagtatgtacagcatggatgcacccggagaatgcagaattaaaagatacggtgatcatacaggcagaagggaaacaggtggctacatctgtggtggcaaaggaagtgtggatttcaggtgaactgtcctatgtggttattatgcgtacgcatgaaaattaccgtggtcggaaagttttcctataccagaattgtggcttttatggtaaagtagttatattgaagaaaacagaagaagggtttgaagtactccgcttccgggcgtagaacgaaaataaggtgggaaacaagatgaaaaaactgaccattaatgaaattgcagaaatggtaggagtttcgaagacaacgatttctttttatttgaacggaaaaacgaataaaatgtcagatgagacacagaaaaagatccagcaggtcattgaagagaccggttacacgccaagcgctgcgaccagaacagtaaaggcaagcgatgactgtatcggcgtgattcttggagatgtgtccaaaccatttgcggcaaaggcactgaaaggaattgaagaagaagcacatgaggccggatatcaggtgatcgtgggaagtaacgagatgtcatttgccaaagaaaaagaatatgttgagcatatgctgaaaatgggagtgtccggttttatcatacaggcaacatacaggtttggaattttggcaatggaattggaaaaaaagaataaaaaggtcgtatatctggatattccaccttatgattcacagggggtaagaattctgggggacaattatcaatgtgtgtatgatacgatcagtcagtgtattggtcgggggtatgatcagcttctggtcgtatccgatgccaatgaatctgagtatacgggaatggacaatctgcggggatttaaagatgcggcgaatgatgcgggaatttcattcaaaacgtattttattgaggcagagacgacccgggaagagattcaggaatatcttgcgcagcatatcagcgaatataagaaaacactggtgtatgcttcggatgtggaagcgctccggaaggtatatctgggaatcaagctgttccctgactttttgttgctgttcccggaacgtctggggttgatcggatttgatgtgactggttggaccaagatggcagtgccggagatcacatcgatcatgattccggcatatcaggagggcaggattgcttcacaaaaactgattgagatgatcgaaagtaagaacagcatttcaaacaaaaagattgtgataaagaatgcggtgcgctggagagacagtacactgtaacaggaggaagagaagatgatacagattaaattgctggatgcagaaaagaacattgtagaagaagtacagggagaaaaggaagtcaacctgacgttgagaagagaataccaggaaggagattcccttctttttgaaatccatggagaaatcggacattactggatgcaggtagacgatgcactgggaaaatctctggtatatctgacgggagatcaggtgtatgagattccatttgaagagaagaaattcaacctttctccaaaagcatttacaggggaaaaacagctgatctccctgcgcaaagcaagaccatacgaagtggatatttaccggaatctggcggaaaatgtcaatgaccagcacggagatgtgaactgctatccacatgcatctgcaaatgtagagacaaggggagaagccgtgttcgcagcaaagaatgcaattgacggagtgacagcaaatcacagtcatggcaaatggccatttgcatcctggggaatcaatcagagagacgatgcccagatgaagctggagtttggacgtgagatcaagacagacaggatcatactgcatacaagagcagacttcccacatgacaactggtgggtaaatgcaacggttgaattttcggatggaaccagtatgcttctggatttgaaaaaaacagatgtatcacaggagtttacatttgaagagaaaacaatcagctggcttgtattaaaggatctgatcaaagcagatgatccgtcaccgttcccggcactgactcagattgaggtatttggaatagagtgttaagttggagggtaaaatggaaatccgcaagattgattacaataaaaaagaatatctggaactcttacttctggcagatgaacaggagagtatggtcgatcgttatctggaacggggcgatccgtatgttttatacgatgagggtgtagtaaaagcagtctgtgttgtgacagaagaaggggaagatcttctggaattgaaaaatctggcggtgtgtccacagtgtcagcgaagtggatatggcagaaaaatgatcgagtttctctgtaaagaatacaaaggaagaaaaacaattttacaggcaggaaccggagacagtccggcaaccctgcccttttatgaatcgtgtggattcacacagtcacatagaatcccgggattttttgtggataactatgatcatccaatcatagaatgtggaaaacagctgagtgatatggtgtatttgaggaaaagattataagctcttttttccttctctgttcaggatggaagtagattccctccatgcttttggggttgctccgctgattttcttaaacaggcgcgtaaagtaatgaatgtctccaattccacagcgaagagcaatgtctttgatcggtacatccgtattggcgagcagtgtctgtgcatgttcaattcgatagtgattgacatagtctgtcagggatgttcccatttctttggagaataaggtagacaaataacttgcgtttacaccaagatcacttgccagctgattcagcgtcaaatcagcggaaagatctgtctccagataggcgactacttttcggatgagcggagagtgaatctgatgctggtgctctttgatgatccggcagtatccaagggcaattgtctgttgcgcgcgcaggcactgctgagtggaagtcaggctttccagcatgacaacattgcagttggagtaggcatcaatatggatggggtgcacgccagcctgttctgctgcttttcgaagcagtgtatttaatgtgatcgtataatttttcatatctcttaaattattggttgttctttgtggaagcagccaggtctcaaatttagaaatcaattccagcgtttggctttctctgccggaagcaacggcattgatcaacatgttttctgactcgtatcttttttcaatcacatcaatattcgaaaaagggtgttctttatctcgtagacaatgtttataggcattattccaatgatcaaaaaagtcagtattggaatagactacttcgcaggagtctccgtaaagttttttaccaagttctaaaaataggctttcaaatagcgcataggatcccaaaaaaggaagcctctgataatatgtttgaattgcatcgtgataagtttctcctgaatccgtgaagttcggagatttttaatgttgatccctgaagggaacagatcaacactgagaatttctattctgtggcatgcaacacttctttgtaaagatcatcgttgccttaagcagcatgtttatccacaggcattgcctaaaaagggcagacgccccccttaagcgctacctgtcatggcgaaatatagaagtaaaatagaaaaaatcatcacatactgaattgtgcaaatgcagtatatatttcggcgaacgtatgtcgccagacattacttttgcccagacccataatcaattgccgtgcatgctcggtaacatggcttgccatcataatcatgttgctgataaccgtacggagtctgcgacgatgtaccttatggcgtgtttttcttctgccaatggattcctgtccaatcatccgcaggatattgtaggcaagaatggtcaattcaagcaccagttcattggtgtcaaactttccggaaggcagccgttccacatccatatcggtcttgatttcactgtgaaactgctcacattcaccatgggcatggtaattctgaatgacttcttcatctatcatcccggtattcgtccaccaagtgttcacttccagatcagaaggaagaagaaattgaccatatttatcgatggtgcgttctatgatttcgtatcctgtacgtatggtaacggttttatcactgccatccactgtgtgataagtgacatctttccagtcacttccaatatagacggtttttccgtcacgtggggatgtgatattttgcgagttggtttttgccatctcgaaccacgcttccctgctttcacggcgtagatttcgttttataatgaaataacagccgctttccaacagaattccaatgttctctgcggcatcattcccggaatctaagcggataaggagcggctcatttgtgagttgtttacacagtttaattgtttcacgcagaaaaccgggtgtgtcgcactggcaatgttgccttccctcacgcagttgtgcattgattagatacccttccgttccgatataagccatgattggagcatatccatcataccctttataagtacgtgatacgccttcttttctggttttcgaattgtcaaatggtgtgacatcaatgtcaaccggaacgaaaccattgggaagtttggaaggaacgattccattggaacgcaaaagttccacgttttctgccagaatatgttctcgctgggaagagccaatatcatccattctctggcggagggtttcttctgatggaatgttgtaggcgattccaagagcacttttataaaaatcccggtcatcatccatttcatgaacagcctgaaattgtggtttccccatacacaacataccaatataggaaaggagaatgtcgccatttttaatctgatgctgcgaacggttgggagttacatccattcgattgcagcgttttacaaaattgcttttgccaaggatagcacctacaacagcaagaccgcttgcaggaataatacgttcattggtaaattcaatttttatatttttcatgatattctctcctttgtaatgtaaatttctaagaagattataccagaaagagacttcacccaacaggtgaaaataaaaaatacggaaacatcttgaaaaccattggaaattcagccctttcgatgattaaggggagttgaacttcacggattcaggtttcttttaaaggcagactggaaaataattctttaaagcgttccccctgcatcttttcaaatacaacaggtccacaatagaaaaccgtttttgaatctggaagcagcaggaaggcaaacgtacactgaaacagatccgtgttaaaatacacctttccctgtttcagcttctcaaacatatcatgaaaaaactgggaagtattttttacaccgagaatgtggtaacgaagtccctgatccagatgttccagattttcacagggcagcgtaaacctgtaaactggaagataatttgtttccagtattttttgcgtgaaatcaatcaattcttcgtgtttcatagcgtctccttcttttaactgaaaattgtgcaaaaaactacaaaaatcatcactgttattttttgaaaaatttacatacaataatcatacaacaaatgtgtgaaaaagccacgaaaatttgaaaaaatcataaaaacaaaggagaatgggtatgcgcaatgtaatcaatttaaacaaggactgggcatttattcagcagaatgcaggactgccagaggagatgccatcagactgggaacatgtagatcttcctcatacatggaatgcggtggatggacatgatgggaacggaagttatgacaaaggaacttactggtatgcaaagacatttgaaacaccaaaacagcctcttggaaatggaaaggtttacgtggaaatcctggcagcaggccagcaggcaacggtatatgtaaacggaaaagagatgacatatcatgaaggtggatattctacattccgtgtagatatcacagatgtgtgcaaagaagaaggggacaatcttttggtagttgcatgcagcaatgaactaaaagacagcgtatacccacagtcagcagattttacattttatggcggactttacagaggtgtgaatctgatcagtgttccggatgcacattttgatttggagtattacggaggaccgggaatccaggtgacttcaagaccatgtgagtgtggaggagcagaatttgagattgtttcatacgtaaaaggagcagatgaaaactttactgttctgtattccatttgcgatgcagaaggaaatgaagtggcgagcgcttgccgtccggcagatgagacagcagtgaaggtatatgttccggatgcgacactttgggaaattgatgctccatacctgtatacagtgaccgcaagactgcagagaagaaacgagtcttatgatgagatttcagcacgtgttggagtacgcagcttttcctgtgatccaaacaaagggttcatcatcaatggtacagagactccgctgcgtggagtaagccgtcatcaggatatgctgtataaaggaaacgcattgacaaaagaagatcattatgaggatgcaagactgatcaaagaactgggagccaataccattcgactggcacattatcagcattcccaggatttctatgatgcttgtgatgaaattggatttgttgtctgggcagaaattccgtttatcagtgtgatgaatcaggatccggatgcacaccagaactgtatcagtcagttgaaagagctgatcattcagaattacaaccatccatcgatttgtttctggggtatttccaatgaaatcctgatcggaggaatttcagagaaactggtagaaaatcataaagaactcaatgcgcttgcaaaagaactggatccaagtcgtctgacaacgattgcacatgtatccatgactccgatcgagggaccaatgcatgggatcacagacgtagaaagttacaaccattattttggatggtacggcggtaagatggaagacaacggaccatggatggacaacttccataaagtacatccggaaatctgtctgggactttctgaatatggatgtgaagggatcattacttatcacggcccgaatccggcatgcaaggattacagcgaggagtatcaggcactgtatcatgaacatatggcgaagatgcttgaggagcgtccatggatctggtccagtcatgtatggaatatgtttgacttcggttgtgcagccagagacgaaggcggtgtagcaggaagaaacaataagggactgatgactcttgaccgtaaagtgaaaaaggatagctattatatctatcaggcttactggaacaaacagccaatggttcacctctgtggaaaaagatatgcacagcgtgcaggtgaaacaacagagatccgtgtatattcgaaccagccttcggtcacactgtttttaaatggagaaaaagtggaagagctttcagcagaaaaagtatttgtatttacggtggcattgaaagacggatttaatattctgacagcacaggcaggagaggtcaaagatacgatgactctggaaaaagtagaaaaagaaccggagatttatgtattgccggaagtcaatgaacgtgcagaaggcgttgcaaactggttcagtacagttggagacatggatctgaaagctccgatggagttcccggaaggaatgtacagtatcaaagacagcctggaggaattggcaaaatgcccggaagcaattgaaattgcagccaaagcggtgaaacttacaatgaatatggtagtttctccgggagaaggtatgtgggatatgatgaaaggtatgtctttggaaagacttggagaaatggcaggttctctggcaccggaaggatttatcgaaagtctgaatggaaaactgatccagatcaaaaaggtatgattaaaagctggtagttcataggaaaaacaaggagaaaatgaaaatggggaaaacaaataattccactgtcccggcatttgggatgaaggatagactggggtatatgtttggtgatttcggaaacgatttcaccttcatattgtcctcaatgttcatgatgaaattttatacagatgttatgggcttatcagcgggagttgttggtatgctcatgatggcagcacgctttgtagacgcgtttacagatgtcacgatgggacagatcgtggaccgttcaaaaccaaccaaagacgggaaattccgtccatggatcaaacgtatgtgcgggcctgtggcaattgccagtttcctgatctatcagtcaggacttgcagatatgccgtatggagtgaaagtagcctacatggttgtgacatatttgttatggggatctattttctatacttccattaatattccatatggatctatggcgtctgcaatctcgccggatccgacagacagagcttccttatctacatggcgttctgtaggagcttctctggccagccttgtgatcggtacaggaactccattggttgcatatgttacggtagatggcaatccagtgctttccggaagtcgtatgacgatcatcgcaggtgtattttctgtactggcagtcatctgttatctgctttgctacaacctggtacgtgaacgtgtaccggtgccggcaaataatcagaaactggatattgttgctcttggaaagagcctgatcacaaaccgtgctcttctcggaattattgcggcagcactgcttctgcttctggcaatgctggggatgcagggaatgtccgcatatgtattcccaaatgtgtatcgaagtacacaggcacagtcggttgtagcattgttgagcaacgtagcgatcatcgcgatctgtgctccgcttgcaagtaagctggcatcaaaattcggaaaaaaagagttggctacagtttcctgtctctttggtgcagcaagttatgtggtttgtttgatcctgcatccggaaaatgtatgggtatatgttatcttttatgtaatgtctttcgttggactcggatttttcaatacgatcatctgggcaatgatcacagatgtcattgatgacgcagaggtgaaaaacggaattcgagaagatggtaccatttatgcggtgtattctttcgcaagaaaactcggtcaggcattctcttccggtatggtaggaggactgctgtcactggcaggttatacggcagcgactgcttttgagccggctgttacagagagcatctttagaatctcctgtatcgtaccgatcgtaggtttgacagcggttgcacttgctttgatcttcatttatccactgagcaaaaaacgtgtggaagaaaattgtgcagaattggcaagacgcagagaagaaaaataagaagaaatgaaaatagaagcgctgcagtttttatgatggaaaaatcatgaaagctgcggcgctttttgttatggagaaattataagaaaaatttaagatttacattgcgtttttttaagccgtccatattatagtttacatagagaaaaggaatgcaggagggatagcatggacagtgaaacgatacttgttgtggatgacaatcaagaaattgtctattcgatcagtgagttactgaaatatgaaggatatcaggtggtaaaagcatatgatgggatggaggctctgaatgctttggagataaacaacattgatctgattttattggatgttatgatgccgaggctgaatgggttgtctgcattgatgaaattaagggagaactatcggattccggtgatcatcctgtcagcaaaaacagaggagagtgataaagtatccggacttgttctgggcgcagatgattatgtagaaaaaccatataatccggcggaactgatcgcccgcataaaagcacatctcagacggtatcgtgcatggggaggtgcagcgccggaagcagacagtgacaccgttgtaaatggagggcttgtgctggataaaaaaaggcgtatcatacttgtggacgggaaagaagtccggctgaccgccacagggtataaaatcctggaatttctgatggagcatttgggacaggtgttttccgcagaacagatttatgaaaatgtgtggcaggaatcagcgaattacacggtagaaaatacagtgatggtacatatccggcatatccgggaaaaaattgagatcgatacaaagaaaccaagatatgtaaaggtggtgtggggcattggctacaaaatggaaaaatatcattgagacaggaaaacgtttgttaaagcaacagtggcaggtattagtaagtgtcatgttggcaggatgtggaatttttgtcttttatatcctgatcgcttatcgaacctattatccgacagaaaaaatcctgtattttgggatactcgggaatattctgttaggaagcgggacagcatatctgttagaaaagggactgaaccgaaaatatcagaactggatccaaaaagaagatgcttattaccgggagtggagagcagaaatgaaaaaaatggagcatcttcttcaagtgatcggtattctggcatttgcagcagcaggtatcttctttgtgctgcagagtaaatttcgagagtactggagctggtattacaattatgctgccggttatgtgatgctttttacagtattgctccagtatatggtgtggcagtttgtgcgccgacggtttgatgagaagaaacgagaagtgctgatgggcaaactggaggaaatcaatcaaaaacggattgcagaagcgctggagaacgagaaaaagagccttgcaaaagtttcacgcagtgaccagcttcgaattgatctgattaccaatgtgtcgcatgatctgaaaacgccgctgacttccatggtgggctatattgaactcatcaaaaaggaagaattgagcgaccttgtcagagattatgtggatgtgctgtctgaaagagcagaaaaattaaaagaaatgataaacagcttgttttctcttgcaaaagcaagcagcggtaatatcgaactgcatccggaaaagtttgaactgaatcgtctggtggaacagatttttgcagatatggaggatcatgtgaaggagagtgagctgcagttcgtaaaacagcttacggaggaaaatacagaaatcatttctgataatatgtatttttacaggatctgccagaatctgattgagaatgcgctgaagtattcggcaaagcatacgagagtgtttgtgaaaacttatcaaaaagagtcttcagatcatctgtgtctggagatcacgaacaccgcaggatatccaatggattttacaaaggaagagattatcgagcggttttttcgtggggataagcagaggtccagtgagggaaatggactgggacttgcgatcgtaagtacgtatgtaaaagcgcttggcggagagtttgatattaaaatcgactgtgatcagtttaaggcctgcgtggagataccacgtgagagaagcaaaagagagttggaataaactttccctggcaattgaagaagcgtagtaacaaaagtggttaaattttatatattttttagtcgaatgccttgacaaattccttgcattgtgattatatgaacatatgaacagttgttcatatgttatatatggagggaaaggacatggcaaaagaagtattgacagaagaaagacataaaaatgatcatcaccaccatgaagaatcatgtggatgtgggcacgatcatcatcacgaagacacatgcggctgcggacacaatcaccatcacgaagatgcatgcggctgtggacacgagcatcatcatgaggaacacaaagaggcagatcatacctttgatcatgcagagaagcaggtgtatattctggaaaacctgggatgtgcacattgtgcgtctaagatggaagaaaagattcaggcactgccgcaggtagagtttgctgcaattaccttcgcgacaaaacaactgcaggttgtgacgaatacggatgcggagctgttagaggagtttcagaaaatctgtgcatccattgagagtgaagtggttgtgcgaaaaagagacggaggatcaaccggaaaaagggagtctgcaaaaggcagattttcagaaaataaaaaggatctgtgggagattggaatcggagctgttctgtttgttctgggtctgtctacacaggagatgaatggatggatttcctttttcgaactgatcataggatatctgatccttggaaaggatgttcttatcactgcggcaaagaatatcggaaagggtcgtgtatttgatgagaatttcctgatgggagttgctacaattgcagcgatcgtaatcggagattacaaagaagcagtgggtgtaatgctcttctatcgtgtaggggagttatttgaagatatcgcagttgcaagaagcagaagtcagatcatggaggcagttgatctgcgtcctgaggttgtgaatcttgtagagcaggatggaacgatacgggagattccggcagaggaggcaaaagttggagatgtgcttctggtccgtgcaggagaccggattccactggaaggtgttgtactggagggggagagccgtctggatacttcaccggtaacaggggaaccggttccggttgccgttgtaccgggcagcagtgtgacttccggatgtgtgaatctttccggtgtgctgaaaatgcgtgcagaaaaggttttggaagactccatggttacaaggattttgaattcggtagaaaatgcagcagccagcaagccaaagatcgaccgttttattacaagattttcaaaagtatacacaccggtcgtggtagcattggcggtggcaacagcaattatcccgtcgatcctgaccggggactggaactactggatctacacagccattaccttcctggtaatcagctgtccatgtgcgcttgtgttgagtgttccgctggcatttttctcaggaatcggagcaggttctaaaaaaggaattctgtttaagggtggagttgcgatcgaggcacttcagaatgtaaaagcagttgtaatggataagacgggaacgatcacaaaaggaaattttgtcgtacaggagattgttccggcaggatcatacagtcaggatgaactcctaaagacagcagcatcctgtgaagaagcatcttctcacccgatcgcagtcagtattatggcagcggcaaacgagagaagactttctgttgagcatgcaaaacaggtaaaagaaatttccggaaatggaattttagcagaactctcagaaggaactgtactttgtggaaacagaaggcttttggagcagaatcaggtagatctgtctgcatatcagccgaaagcgtatggaacagaagtattactggcagtagacggtgtctatgcaggatatcttgtgatttcagatactgtcaaagaggatgcatcgcaggcagtggcagccatgaagcagcagaatatccggacagtcatgctgaccggagatgcaaaagagaatgcgcaggcagtggcagagaagatcggaattgatgaagtgcatgcaaagcttctgcctcaggataaggtaacagaattacagaagatccgacagaaacagggaagtgtgatgtttgtcggagacggaatcaatgatgcgccggttctggcaggcgcagatgtgggagctgcgatgggaagcggagcggatgcagcgattgaagctgcagacgtggtatttatgacctcttctatggaagcaatcccgcagtctttgaagattgcaagagcaacgggaagaattgcaaaacaaaatgttgcatttgctctggtgatcaaagcactggtcatggtatttggtctgcttggtctggccaatatgtggatggctgtgtttgcggataccggtgtggcggtgatctgtattctgaatgcaatccgcattctgtataagaaactctaaatccaaaatcaatgatattaccgcagggcggcacagtcgaaaggctctgccgctctgttttcttatagaaacagataagacgttgacccgcacctgtttttttcgtataataaaagtcaatcggtgcctcaaaaacaagagcgggattacaggttttgggggaaccggaagggagaaagaatatgagaaaattagaagtggaacattgtgatctgatacattctcatagtgatacagtcagacagatacaggaaaagattccggaagagcaggagatcagagggctggcagatttttttaaggtatttgcggatgccaccaggatccggattctgtgtgtgctgtcctgttccgagatgtgtgtgtgtgatctggcgcagacactggatatgacacagtcggcgatttctcatcagctccgactgttgaaacagatgaaattggtagtcaatcgaagagaggggaagacggtgttttattcactggcggacagtcatattaagacgatcatgaatcaggggatggaacatatcagggaatagatatgaagaaagaagtaaagcgaagagccatagaatgtgcggcggctgccgttttgtatattgttgcgatcgtgggaagctcgtatgcggagctggaaagagagatgcgtctgctgatttttctgcttccgtatctgatcatggtttttgcgacggtcaggctgctctggaacaatctgaagaaaagaaagttgtttgacgagaatctgctgattttgcttgccacagcaggtgcatttgcagttcatcgctattcggaggcagtgggagcgatgctgtttttccagattggaaagctgctggaacttatttccatgagcaggacgagaaaatctattgagaaatttatggatatccgtccgcagtatgccaatttaaagatcagcggcggggagatgcaggtaccgccggaagatctgaatccgcggcaggttattattatcaagccgggggagaggatccccgtggatgcgatcgtgacacaggggagaagtacgttagataccaaggcgctgacaggagaatcggagccgaggcatgtgaagatcggcagtcatatttacagcggaagtatcaacttaagtggtgtgctggaagcacgggtattgaaggcgtctgcagattcgacagcatccagaatcattgatatgatatccaatgcggacaacagacgggcgcagacagagaattttgcagaaaaatttacccggtattatacaccgcttgtaacgcttttcggaatcctggtgatgatccttccgccgatgatgtttgaaggggcacagcagggggcgtggatctatcgggggctgatcgtgctggtggcagcgtgtccgtgcggacttctggtatccgtgccgctggcattcttaggcggaatcggagcagcttccagacagggtgtcctcatcaagggaagcaattttttggaagcattatcaaaggcagagacttttgtatttgataagaccggtactctgacagagggagtattccgggtaaaagaagtgtgtccgaagtcgatgactccggaggaacttctggaactgacagcatatggggaagcatactccagtcatccgatctccggatctttaagggaggcttacgacagaccgatcgacaaagcaaggatcggggcagtcaaagaatttccgggatttggtcttgaggctgttgtggacggaaaacaactggagattggaaattccaagtttatgaaccagcagggatatttttatcaacgggtggctgatatcggaacagcagttcacgtagctgtggacggagagtatgcgggctatatcctgatcacggatgtggtaagaaaagaggccggcagacttctgaaatggctgaaaaaacaacagatcgaagcggtgatgatcaccggagataatgaacgggtggcagaagatgtggcccggcagttaaagctggattatgtatatgcaggcctgatgccggaggaaaaggtagagcaggtcagagaatttatggaaagccatatggaggatgagaagctggcgtttgtaggggatggaatcaacgacgcgccggttcttgcacatgcggatatcgggattgccatggggggcctgggctcggatgcagctctggaggcagcggatatcattttgatggaggatgatctttccaggatcgtgaatgcgatccggatttccagaggaacgattcgtgcggtgaagcagaatctgatctttgccattgggatgaaagttcttcttctggtgctggcatcctttggctatgtaacaatgaaaaacgcaattttagcggatatggcagtgatgatgatcaacttattgaattcattctgggtgctgaaatatccggaataaggggtgtacaacatgaaaagagcaacattgcttgcattggcagtatctgcctgtcttttgacaggatgtaccaatgcactcaaagacggaacagggtatctggaagacggaaattataaagaagcagtgaccgcatttcagaaagcggtggacgaaggcaagaagacggcggaggcataccgcggtctgggaatggcatattatgagctggaggattatgaatctgcaaaagatgcatttgagaaagcaatttcagcaggcggaggaaagaatcaggccatttataatttcctcggaatctgcgggatgaagctgaatgattacaattatgcactggagcagtttaatcagggaatcagcctgtctcagaacagcggtacgtccatggaagatgcagaaagtttcagcgaagtgcttcaggagatgctgttcaatcagatcgtatgttatgaaaagctgggtgactgggagaatgcaaaaaccaagatcgcagagtatattcaggtctatccggacgatgcagatgcccagagagaagcaaaatttctggagaccagataaagaatacaagggaagaagaggatacgctgactgcggagaagattctgcggtcagcgtcctttattccggggatgagaaaggagagcgtatgccgggatatcagattaccgagtattgtcatcggatgataagggagcatatcaaagaaggagactgctgtgtggacgcaacggccggcaatggaaatgatacagaatttctctgtcgtctgacaggggcagacggaaaggtctacgcattcgatattcaaaaagcagcagtagaacacaccagaaagcgtctggaagaggcgggactctcagagcgtgccaaggtgattctggatgggcatgagcatatggagaactatgtccgggaaaccgtgtcagcgatcacctttaatttcggttatctgccgggcggtgatcatcagatcgcgacacaggctgatacaagcattcaggcaattgaggcagggcttcgcctgctgaaaaaaggcgggatcatgagcctttgtatctatagtggaggagacagtggattcgcagagaaagaggcactgttgtcttatcttgagacactggattccagaacatttttagtgattgtaagtacttattataaccgccaaaatcatcctccgattccggcgtttgtgatccggatcaaagaagaaaggggagaataaatgggattttcaatggatgtgggagttcctgtagtgaccgtgtttttacaggggcttttaagttttttttcaccgtgtgtccttccgcttgtgccgctttatctgggatatctctcaggaggcgcagagcagggagaactgtacggaaaacgggggcggctgtttgtcaatacgatttgttttgtgatagggatcagctccgcattttttatgatgggacttggtgtgtcggcagccggaagttttcttaacaagaatcaggcaatggtatcgaggatcggcgggattctggtgattttattcggtttgtaccagcttgggatttttggaaaatcaaagcttctgggtacagagcaccgtttctggttaaagctcgacaagttgaagatgtcaccggttgtggcgcttgtgtttggatttacctttagctttgcctggacgccgtgcgtgggaccggctcttgcgagtgtgcttttgatggcgggaagtgcaggaacaaagctgacaggattccttttgatcggtgtgtatacacttggatttatcctgccgtttcttgcagtgggactgttcacggcaaaagtgctcgggtttttcaaaaagtacaattatgttgtcaagtatacggtgaagatcggaggaatcctgatgatctttatgggacttctgatgtttacaggcaagatgaacgcgatcaccggatatttatcgggaacagcaggaacacagacttcatcaaaagagacaacgaaaaaggaagtaaaagaagagaccgaagatacggagtcagaggcgcaagaggagaaaacagaagaaaagcaggatacgtacccggccacagattttgtgctgcaggatcagtatggaaaggagcacagtctggcagactataagggaaagacgatctttttgaatttctgggcaacatggtgcggaccgtgcagaaatgaaatgccggagatccagaaaatttatgaagaaacacagcaggaagaagacagtgatctggtgatcctgggaattgccgcgccgggattcggacaggaaggaagccaggaggagatcgaggcatttcttgaggaaaacggatacacctatccggtgctgatggatacgacaggagaggtatttatgcagtatggaatcagcgcttacccgacaacttttatggtagacaaagacggaaatctgttcggatatgtgcaggggcagttaaacgaagatatgatgcgcagcattatccggcagacgatagaaggcaagagagagtaggagaaaagcaatggcgttatatgaaatggaagatgcgaaagaacgcgtcattttagtaggcgttcaggaaaatgatgcggagccggaggaagaatccctggatgagctggcagaactggcacgcacggccggtgcagaggtagccggccgtctgatccagaaacgagaggcgatgcatccggtgacgtatatcgggaaaggaaagatcctggagctgaaggaacttttgtgggagacagacgctacgggaatcatctgtgacgatgaactgacttccgtgcagctgaatcatctggaggaggagctggaatgtaagatcgtggatcggacacttctgatcctggatatttttgcgggaagagctgtcagcagagaaggaaagatccaggtagagctggcgcagttgaagtatcgtgcggcaaggctgataggacttcgaaattctctgtcccgcctgggaggcggcatcggaacaagagggccgggagagaaaaaactggagatggaccgccgtttgatcagggagcggatcagccgtctgaaaaaagaacttcgggaagtggaagagcacagagagaggcttcgtactcagagaaaacgctccaatctgaaggtggcggcgctggtgggatatacgtcagcaggaaagagcagcctggaaaatgcgctcacaggagcaggtgttttagaggatgcaatgttgttttccacgctggatacgacgacacgctctctgaggctggcagatacacaggaaatcctgctcagtgatacggtcggatttatccggaaacttccgcatcatctggtagaggcatttaagagcacactggaagaagcgaaatacgcggatatcatcatccatgtggtcgatgcttccaatccgcatcaggatacccagatgtttgttgtctatgagacactgcgtcagctcggtgcggagggaaaaccggtcattaccgtattcaacaaacaggataaactggaaacaccgggatatttccgggattttcatgcagagtactcaatcccggtttccgcaaagacagggcaggggctggaagaattaaaagaagcgctgcttgagattctgcgaagagatcaggtatatatcgagaggctgtattcctttgcagaagcgggaaagatccagctgatccgcacccagggacagctgctgtcagaggaatatgtaccggatggcattgaagtgaaggcatatgtgccgaaagaaatctggggaaaagtgtaaaacttttccctatccccacacttcctgggcaatctctttcaccagtgcaagcttcgcccactgttcttcttctgtcagtttatttccaatctcacaggatgcgaatccacactgcggacttaagtaaagccggttcagaggaatgtattttgcagcttttgcaattcttttctttatcacttctttttcttctaaaatcggtgacttgctggtcacaaggccaagtacgacttttttatgatcggaaacaaagcggagtggttcaaatcctccggagcgttcatcatcaaattccagataataggcagatacattttcattggcaaaaagaaacggcgcgatcggttcatatccgccggaggatgcccaggtggaatgataatttccgcggcatacatgggttgtgatcacaagatcttcaggtgcattttccagagcgaggttattcagccgcagatatttttcagcttcttcttccagactgacggaatctttttgtcttgcctcccagtaatttttgtcgcagaacattccccatgtacagtcatcaaactggatatttctgcatcctgcatcgtagagatcccggatgacagtccggtatgcctgtgcaatgtcctgaatcagttcttccagatctggatatacggccagagtctgtgttccattgtcttcccggaagagttctgcaagaagctgggcaggtgcgggaatggtctgtcttgcaatggtgtgctcatcctcaaactgtttgacaaatttgaaatgttccacaaaaggatgctgttctccgctgatttttcctgtcacgcggacagagccgtgagtggtttcttccccgtggaagaaatagccgtgatccagttcaatgtgttcgattccctcaagtccccacataaaatccagatgccagtagcttctgcggaattctccgtctgtgatgacagggtatccggcagccttctgctttttgatcagatctgtaattgcttcattttcaatggattctagctcagcctttgtgatctgtccggcttcaaaatcagctcttgcctgttttaagtgtgcaggtcttaaaaaacttccaacataatcaaaacgaaacggtgcgttaaaatttcccatagtaattctcctgttctgtaaattcgtgattctatgggatttattgtagaagaggagaggtgttttgtaaaatactgaaaataaatagcttgctatagaagcaaactatagcaagcccgttgcattttatgaaaatagtgttttataaataaggggttccgggaacttccgggtagcttcccatagagatcagaagctgaagtcctacttctcttgcggtaaggactgcattttttacggcgcttgcatcgccggttacggcggcaatgatctcattggaatgactggttccccggtttggagtcatgtatttgatgatctctaccggagaggatttcaatgcaaggtccgccatgacaagaccgatcgccgcaggagaaccgcagaagaatccaaatggttttccaatcggggcatcaaacgccatgttcagcgcctgggaagcgctggcggaataggtaaattccagatgcccggcatcactgatatagagttctccggcatatttttcggtgtattccagtgcgatctctacggcgcggcgcacatcagagacactgtagccgccgatgatgataaagtttccgtgaccgccccatcctttggtatccctcggaagttcgatggaaatgatctcggtgttggtagattttacggcttcatcagctgcattgatctgtccggctgcaccggtacgggagcttaacagtcccagacttttgtaaggcttgtcaatctgcatctgctgaagcagtgcgtcattgacgcccgggattacaagtccgatagtatccagtacggttgtcccgacaaattctgtcatggaacagtccatggatattttttgaatttcgttgatatctaacataatgaaaactcctttatgacatacttccaaattaaatataaccgccgtccaggccaatgatctgtccggtcaggtaagaatgaccggatgcaagggtgagcgccagcgcagccacttcctcgctgtcggcaaagcgtccggcggggatttcttctcttaaagcttcgcgttcttcttccgaaaactgtgcgttcatagcagtgtcgatcactccgcacgcaatggcattgacttgtacattacttggtgccagttctttcgcaagagcctttgtcagtccgttcataccggacttagtcgcagaataagcagcctcgcaggaggcaccgacggttccccacatggaggaaatgttgatgatctttccgcttttctgagagaccatgtgaccgatggcgctgcggcagcagtaaaatacagaagaaagattggtatttaaaatctcggaccactgggcatcactcatatcctgcaaaaggccgacaaaggaaatcccggcgttgttgaccagcacatccagccccgggcagatagattcgatgatggcaaacatctttctcacatcatcgggattacctgcatttcctgggagcagtgtgcaggaaccgtgttcgtcaaggatttctttttctacctgctgcagggcatccagagaatgccggcagttgagaaatacatgaaaatgatttctggcaaatgcaagtgcgcaggctctgccgatcccgcgggatgcaccggtgatcagtacatatttctggttcataacatactccatttccagaaggagaacagctgtaaaatgctgctccttcagctctcaattctgtagttattatacaggaagcagaaacgtttgtataccatatttccagaaaatccgaatggggaaagcgggttgcggttgtgattcacaggcccttgtgctattattttgatagagaaccggtgtgtgcacatagtaggaggaacggatatggtagaggaagcccgaagctttgcagaaaaagcacatgagggacagtttcgaaagggaacgaagcgcccgtatattgtacatccgctggaggtggcgaagattgtgtcaacgatgacggatgatgaggagatgatcagtgcagccttgcttcacgatacacttgaagactgcaggcaggtgacaaaagagcagatcaaagaggcgttcggcgagcgtgtgcttgagatggtcaggcaggagagtgaggacaagtccaaaacctgggtggagagaaaaagtacgacaatccgacatttgaaaacagcgcagagagaggtgcagatgatcgctcttgcggacaagctgtccaatatccgggatattgaccgggagtatccggtggttggggaagaattctggaaccgctttcgaatgaagagcaaagctgcaattggctggtattatattggggtaaaagatgcgttgcaaaaagattttgcgggaattcctgcatatgaggagtacagggcactggtagaaaaaattttcggcagtacatcagactggcaaaggagagaacacaatgaagaagacaaagatcatatgttttgcgaataataaaggaggaagcggaaagtccacgacttgttccaatgtcggatacggactgcgggagctgggatataaggtacttctgattgatggagacatgcagctgaacctgtcgctttccttgtttgatgaggatcaggtgcttgcgtttgcgcagagtgaaaagaacttgtatgagggattgaagcgccaggatgatctgtcggattacattgtacattccgcttatgaagggctggatctgattccgtcttccacattaatgagttcgatagagtatgaattgtttacgaaatggcagagggagtttattctccgaaaatgtctgaaacaggtaaaggaatccggagcgtatgattacattctgatcgatgcgcctccgactttgggcggctgggttatgaacatcttgtgtgcatccgatgagatcatcattccggtggagtctacgccgtggggattgttcggtctgggaaatatgtttgaatttctggaggaagtccgtcagatcacgccggatctgaagctgggcgggatcgtgatcacgaaagtagataccagaaagagttatttcaaacagactctggagactttaaagagtctggaggatgttcctgtatttgatacctatatccgggtggacagtgggatcgagtggtcgcaggataacaatgcgccgatcatggcatacaaaaaaagcagccgcagtgccacagagtatatggaactgacaaaagaaattgccaaaatggagtaggtgagtcatgcacagggaattgttggatgccttgtctgtcattacagaggaagagcagcggatactggatgaacaaagagggatcgacccacagctttatacagagaaaaaggaactgatcgtagacagcgaaaaattgttgaaaaaagggaagctgatacaggtacgtccccatacgagatttgttaattttccgaagcataaacacaattatgtagaagtgatctacatgtgtcagggaacaaccactcacattctgaatggaagtaaggtcattctggaggcgggggatcttctgtttttgaatcagaatgcagaacaggagatcctgccggccggcgagcaggatattgccgtcaattttattgtgctgccggaattttttgatacggctttttccatgatggatatggaggaagaaaatgcgttgaaagaatttctggtaggagctttgtgtggaaagaatgatcagacatcatatttgtattttcatgtggcagagatccttccgatccagaatctggtggaaaatatggtatggacgatcttctatgaccagccgaacaaaaggagatgtaatcagatcaccatggggcttttgcttcttcagcttttgaatcatatggaccggatggagaccggaacagctgcttttgaccgggaactgaccggagcggtgttgaattatattgaagagcactataaaaacggaagtctgtccgagctggcagagattatgggatatgacatgtactggttaagcagggagatcaaaaaacggacgggaaagacgtataaagagctgcttcagtcgagaagaatgcgtcaggcggcatatttgctgaagaacagcaggttgtcggtggcggatatcatagagtcggtggggtatgacaataccagttatttttttcggaaatttaaggagtgttatggagtcagcccgaaggggtatcgggatatgtgagaaagtgaaagaaaagcaagcctgaatacaggaagagcagagaagcaatttctggattcaggctttttgtgtttcgagacattaaacctcagaaaaatcaattttcagatcttcataaatattacatgttacaaaatctgttatcgctgccgataaagcacatgcagctgcatctgtagaacgagactttgaaaaggaacataaagatgagatgcagagattatgtgataaaatcgaggctctacaagaggaatgatttgagctgaaagataaattaaaagagttaaaaaagggaatacttgattttagctgtcgcatatgctatactagcggtagctaaaaaggatataagtgtcaagcagcacacaaagtgaaagccccggaggtcgcaactccggggctttcttttaggctagttgtcactgtcgtttctgtctaaccatttgcagacgtagtagctggctacgcttgccataacggaaaccaaaaaagatataggtaaaagcgctagaataatgtttttttgtattatatattttttacttgttcgttttcactacctatcagtgtcccctcttataattgtctttattgtagcattgccggttactacgaattaaactgcgcatatttcttcggagaaatcccgactgccttggtgaatgccttcagataattgctgtagtcattaaatccgcacgcttcacaagcttcattgacagaatatccctgacttaacagcgacttcgagatggtgattcgctttgcggtgatgtatttgttgatggtcgttcctgtcgtggctttgaaaatccggcacagataagaactgctcaggaaaaaatgtgcagagagttcttccagggtcaggttttcgctgatatgggtattgatataggagagaatctcatccacctgggcgtggtagccgggcgctttgctctcttcttcggcagaagcgcggcagcgtttgtcaaacgcatggtttaaaaacaccatcagttccagaaatgtggcatgatctaagatatcctcgccaaacccggaattggagcgcagtttatggataaaatagataaaccgcgtctgctcctcctgagaaaggtgaagctgatgaggcatatccgttccgcgaaactgaaaacaatgatttaaattggtcgtttccgtagaaatttgttttaagtattccggatcgatcgaaagaatgatgcgctcatgtttttgctggtcgatctgtgtcagatagtgactttcaaactggttgatcagaaaaatgtccccattgctgatgtcataaaaataattgtcgatcagaaactgctttcccccggagatcgaataataaatctcatagcagtcatggatgtgcatatccatggctttttcatcattatataaatgtgcaaaggcgaacgtatgagtatccatacactggcgcatggcttctttgcaggaaatacatcctttcatgaaaatcgtctcctttcatcaggttgttcaaaatcgtcctgtttttcctatattatagttcagaagttcaaaattttcaagatttacagcaagaaaacacaagaaataggggaataatgaatgctatactaagtgcaagaaatgacacagattagtcagtcaaaataagggaaatcaaaaaacaggaggattatcatggaagtaagaacagcagcatcaccaaaagatgtaaaacactacacaacagacagattaagagaggaatttctgattcaggatttattccaggcagataagatcaatctggtatacagccacattgaccgtatcattacaggagcagcagttccggtcaatgagaaactggttctcacagcaggggatgagcttcgtgcagagtacttccttcagagaagagaacttggaatcatcaatatcggtggagatggaatcatcacaatcgatggacgtgtttatgaagtaaatgcaagagacggaatgtatgttggaagaggagcaaaagacatttcatttgaaagcaaagatgcttcctgcccagcaaaattctatatgaacagtgcaccggcacacgtatcttacccgacagtacatatcaaacttgagggagaagctgaagaaggcgttgtgatcgtaaaagatgagaacaaagtagaactcggaacactggaagattccaaccacagaatcatcaataaatatatcgtaacaggacaggtagaaagctgtcagctggcgatgggactgacaaaacttcttccgggaagcgtatggaatacaatgccatctcatacacatgacagacgtatggaagtatatctgtactttgacatggatgatgattcattcgtaatgcactacatgggagaaccacaggagacaagacatatcatcatgcacaatgaagaagcagtgatctctccaagctggtccatccactccggatgtggatccaaagcatacacattcatttggggaatgtgcggagaaaaccaggattacggcgatatggatacaattgcaaacaaagacctgagataattgatagaagagaaggagaaacagttatggtaaatttttcactggaaggtaaaatcgcactggtaacaggtgcttcttacggaatcggattcgggatcgcttctgcatatgcagaggcaggtgcaacaatctgctttaacgacatcacacaggagaaagttgatttaggaattgcagcatacaaagaagctggaatcgaagctcacggatatgtatgtgacgtaacagatgaagcacaggtaaaagcaatggttgcaaaaatcaacgaagaagttggaattattgatatcctggtaaacaatgccggaatcatcatgagaaaaccaatgcttgaaatggaagcagacgagttcagaaaagtgatcgatgtagacttaaacgcaccatttattgtttccaaagcagtgattccgggaatgaaagaaaaaggacacggaaagatcatcaacatctgctctatgatgagtgaacttggacgtgagacagtatctgcatacgcagcagcaaaaggcggactgaaaatgctcacaaagaacatctgctctgagtacggtgagtacaacatccagtgtaacggtatcggacctggatacattgcaacaccacagacagcgccgctgcgtgaagtgcaggcagacggaagcagacatccgttcgatcagtttatcatttccaaaacacctgctgcaagatggggaacaccggaagaccttcagggaccggcagtattccttgcatccgatgcatctgattttgtaaatggacacattctgtatgtagacggaggaatcctggcatacatcggaaaacagccataagaaattgaaaataataaagaggagatcaatatgttagtagcagcgagaacgcatgactatggaaaacagccggtggatcatctggcaaaactattgagatccgaaagcattgaggcagcacagcttgtgctgccaaaagcattttcggagatcaattcttatgaggaagtaacaccgcagctggtggagaggatccgcagaaattttgaagaagagaagatcaagatccagattttaggatgctacatggatcttggaaacccggatgatgaagtgcggaaaaatgccgtggatacgttcaaaagatgcctgaagttcaatcagatcctgggagcgtccatcgtcggaacagagacggcatacccgcgtctgagccgggaagaaaagcagatctggcatccatatatgatggacagtattgcacgtctggtggaagaagcagaacgtctggatgtggatatggccatcgaaccggtctactggcatccgctggaggatctggagacaacggtagaagtgtttgaaaagatgaacagcgaccatttgaaaatgatctttgatccggcaaatgtgctggagtttccaaagatcgatcaggatgcttactggaaagaatggctgcaggcattgggagataagatcgaagcgatccatatgaaagattttgtagaagggccgaacaaagagtattgtccggtctgtcttggagacggtgtgatccggtatggtgagattgtgaagtggatgaagcagcataaaccggagatcgtggttgtaagggaagaattagagccaaagacggcgcagaaggatattgcgtatatgagaaggttgtggatggagcgtgtttgaaagagaatatctaaatataagaagaaaaaagatggttgatgtcagccatcttttttgatggaatcagaaaaattgaaaaaatattgcggttcaatatgttttgtttcataaaaaacaaagaaaaatgcagaaaaacaatcagcataacgtcaaaatagcattcggcaatatgcataaaaatagagtgctaaatttgtatataataaacaaaaggattgggaatgataaaaataatatggaaaattgataaaatgagcagatttgctgtttgaataaaaatgaaattggtaaaattgataaaaaacaacaagataatttgaaaaaatgagtttgcggacaagatagtatgagaatcagctcccttcatgtgatactattttcacataaaaacaagggcccgaaaaaataaaaactgaatctatgaacaggagaggaaacatgaagggaatgaaaaaaacaatagggatcgtactcgtgatcgcattgatcgcagtaggaatttatacctttgtggcagtaaaaagtgagacaagcagtgaaaaggtgcagcttagaatggcacatggacaggcggcagattctgagatcggagagacgatcgagtatttatcagatctggcagcagaagacagttccaagaatctggaagtggatatttatccgagtggtgtgcttggagcagagccttccacggtagagatggtacaggcaggtgtactggatatggcgaaagtaagcgccaatacactgggacagtttgatgagagatattctattttctcactgccatatctgttccgcaatcaggaacactattacaatgcaatggcaaacagtgaagggattcaggaactgtttgaatctacaagggacaaaggatacattgcaattggttattatgcaaatggtgcaagaaattattatctcaaagaagataaggcagtgacagatccttctgttctgaaaggaaagaaaatacgtgccatggtcagcagtacttccatggagatgatcgaactgatgggcggctcaccggtaccgatggcatccagtgaaacgtacacgtctcttcagcagggcatcgtagatggtgcggaaaatacagagctggcactgacagttgacaaacatgaagagattgtaaaatcttatacatacacagagcatcagtattcaccggatatttacatcatcagtacgaaagtctgggacagcttaagcaaagaacagcaggaatatttaaaagagtgtcttgtgaaattgaatgagaattttgtttcaaaatatcagcagatgatggatgatgccattgaagaagcacaggagcatggtgtgactgtttatagagatattgataagagtaaatttatcgaggcagttcagccaatgcatgaggcgtttgaaagtaaaggggacgcttacaagagcctctacgaagatattcaaaaatatgccgttgcagaagaggaggagaagtaatgaagatcataaataaaattctgggaacagtgatctccgtacttgttgcggtcatggttcttgcctgttgctggcaggttatcacacgatttctgttaaatgatccaagtcagtggacggaggaatttttgagatacgcactgatctggatgacgatgcttggggcaccgtacgcttatggaaaagatcagcatttgtcgatccgtgtgctggtggataaatttcagtcaaagaatcagatccgaacaaagatcgcagtcgagatcatcgtattgatcttaagtattgcagtatttattgtaggtggaatcatggtaactgcaaactcagcaggacagatttcagcggcactgaaacttccgatgcaggtttactatgtatgtattccaatcagtggatgtctgatggtgctgtattgtctggagcgtttgaaaagatggttcacagaattaaaggagggaaaataaatggaaattcaggcagcaatcttacttgtaattgtatttttcctgatgctggcgtttagtgtgccggtgtcgtatagcatcattgtttccgcattggtaacgatcgttgcatttttgacacctggatttggtgtgtttgtttctgcgcagaagatggtcagtggaattgacagcttttctctgatcgcagtaccattttttattctggcaggtcttttgatgaacagcggtggtattgccaagagattgatcaatctcgcactgttggttcttggaaaagtaccgggatctttggcactgacaaacattgcgggaaatgcgatgttcggttcaatttccggttctggtattgcagcggcaactgcaatcggtggagttatgctcccgttggaaaaagagcagaagtatgatgagggatttgcggcagcagttaatatcgcaacggcgccggttggacagctgattcctccgacaacagcgtttatcgtattctcggcagcaggtggtggtgcttcggtagctgcactgtttatggctggatggattccgggacttctgtgggctgcatgttgcatggtagttgcattcttctatgcaagaaagcagggatatgtaattaaaagagacaaactgactgcaaaaatcgtagggaagacaatatgggatgcaatcccgagtttatttctggtcgtgattatcatcggtggtattttatctggaaaatttacgccgacagaggcatccggtgttgcggttgcatacgcctttatcctctccgtgtttatttacagaacgatcaaactgagtgaaattccgaagctgttggtggatgcagcagttatgacaacaatcgttatgctgatcatcggagcatcttctgtattgtcatttgtaatgtcctttacagggctgccggcagcaatcagtaaactggttcttggaatttcaagtaataaatatgtgatcctgctgatcctcaatattttccttctgatcgtgggaacatttatggatatggcgccggcacttttgatcttcacaccgatcttccttccgatcgtacagagctttggaatgagcccgatccactttggtgtcatgatggttatgaacctttctgtaggaacgatcacaccgccggttggaaacgtactgtttgtgggatgcagtgtggcaaaactgcgggtagagcaggttatgaaacatctgatcccgctctttgtggcaatctttgcagcattgatgatggtaacttacattccggcactcagcgaatggctccctactgttttggggcttctggagtaatcgtgtttttgtaagtaattccatttagggttttgcgatactttaacggtgaaatactcatgtaggttttgaatactttttcaaaataagtaatactttcatagccgaccgtaccggcaatctcggagacgctaagagtggtctcctcaaggagctgtttggctctctttgtacgcaggatattgacatattcattgacgccgtagccggtgacttctttaaatgagcggcttaaataaaacttgctcagatagaagattccggcgaggccgtctaaagagatggattctgcgtagtgatcagaaatgtagtcggcaatgttatagattgtctgatacttgctgctcttatgaatggcagtttcatctttgatcggagtcagctccgggttgtctctgataaagtcaataaaatagtggatgatttccatctcgatcatggctttgtagctgcggctgcggttggaaaattcagtctttagtacttcatacatatgcaaaaatttttcctgctgcttctgcgtcagattataaactccatagtgttcgcgaaaaaaaggaacaagattgaggtgcgaaaacttttcatcaaactgctgcattttggatttatcaatatacagaatgattcgcgtgtatccggttgtgtcatcctccggagcatgtgtcatatggatcagatttgtatccaccaggatcaggctgccttttttcacctgataggcacggttattgaagaaaaagaggcgctctccttctgtgagaaagtaaatctcgtattcattatgaaaatgattggaacgcatatcataaccactggaacgttttaaatgttccagagaaattccttccatttctgaataataaatgatagtatccatacagtatctcctttgttgtgagcagcgtgtgctttgttaaagctattataagatagaaaccataaaaaagctatatgaaaggattggcataaaatgccggaaaagaaaatgaagaatataaaaagagaaatgatcgaacaaaaactgaatctggtcgtagaaaaattaatgaacctcggcggtccggaaaatgaagatgaattaaaagacggcggagaggcaatcggattttttaaacgtgattttggaatcgcagagtgggactggccgcagggagtggggctgtacggacttctcaaaatgatgaaaatacagggaaatgacgattataaaacatttctgcaccagtggttcaaaggaaatatcgcagatggacttccgtccagaaacatcaatacaacaacccctcttttgacactggcagagttaaatgaacaatatcaggataaagaatttgaaaatctgtgtctggactgggcttcctggctgatgaactgcattccgagaacaaaagagggcggattccagcatgtcacaagtgccaacggtgacagacagggtgtacgcttaaatgaaagcgagatgtggatcgatactctgttcatgaccgtattatttttgaataaaatggggcagaaatatcagaaacaggagtggatcgacgagtccatccatcaggtgctgatgcatatcaaatatctgtatgatacacataccggattattctatcacggatggtcctttaaccgtatggataacttcggtggtattttctggtgcagaggaaacagctggttcacactgggaattctggactatgtggatatgttcaaaggaacactcaatgcaggtgtgaaaaccatcattgtggatacatacaaagcacaggtgagaaagctgaaggaactgcagagtaagagcggattgtggcatacagttctgacagacgcggacagctacgaagaagtttccggttctgcggccatcgtggcaggaattctcaaaggaatcaaaatggggatcctggacgattcatatctggaatgtgcatggaagggtgtgcaggcgattctgaaaaatatcgataaagacggaacggtattaaacgtatccggtggaacaggtatgggatatgatgcagatcattacaaaaacattctgatcgcgccgatggcgtatggtcagtctttgacaattctggcgctggtagaagcactgcagctggcggagtagagtgcaaataaggacgctgttttatataaatagcgtcctttttttacacttttttatttcatataatagagttaaataaagtgcgaaagggaggcagaaaatggataaatattatttggctgttgacattggcgcatccagcggccggcatatgctggcaagtatgaaagacgggaaaatgcagctggaagaggtataccgtttcccgaatggaatgacagaaaaaaacgggactctctgctgggatgtagagcgtctgtttacagaaatcaaaaacggattgaaagtatgtaaagagctggggaaaattccggtatccatggcgatcgatacctgggcggtagactatgtactgctggatgaaaatgacaagattctgggggatacagcaggttacagagacagccgtacaaatggaatggatgaaaaggtgtatgaaaagattccgctgggagctctgtatgcaagaaccggaatccagaaacagattttcaacacgatctatcagctgatggcggtaaaggaaaattatccggagcagctggaacaggcagaatccatgctgatgatcccggattacttccagtttttgttgaccggagtcaagaagatggaatacaccaatgcgacaacgacccagcttgtaagtcctcagacaaaagactgggattacgaactgatcgatctgcttgggtttaacaggaagattttcaaagcgatttccatgccgggaacggttgtaggaaactttacaaaagaaattcaggaggaagttggatttgactgtacggttgtacttccggcaacgcatgataccggatccgcagtgcttgcagttccgacgaatgatgacaatgcgatctacatcagttccggtacctggtctttgatgggaattgagagaaaagatgcggattgttccatggaaagtatgcgggcaaacttcacaaatgagggaggatatgattatcgcttccgttttctgaagaacatcatggggctgtggatgatccagtctgtcaagaaagaatggaaagaagaactttcctttgctcagatatgtgaacaggcatccaaagaggagattacttctttagtggactgtaatgatgattgtttccttgctccaaagagcatgatagaagcagtacagacgttttgcagagagagtaatcagcagattccggagacaatcggggagattgcggcagtgatctacaacagtcttgcaaaatgttatggagagacgattcgggagattgaggaaatcacgggaaatacatacgacacgatttatgtagtcggtggtggtgcgaacgcaggttatctcaacgaactgactgcaaaatatacaaagaaaaaagtgtcggcaggaccgacagaggcgactgcaattggaaatatcacggttcagatgcttcatgatggagtgtttacatcattgcctgaggcaagaacctgcatcggcaagtcatttgacatccgtcactatgatgaaaacggaaatgaaaatcaggaggtataaagcgatgacaagatatgaatcagcaaaagaaatctatgcaaaattaggagtagacacagacgcggcaattgaaaaatgtatgcaggtaccggtttctctgcactgctggcagggagacgatgtaacaggatttgatcacgatggccctctgacaggtggaatccagacaacaggaaactatcctggaaaagcaagaacaccggaagaattgatggcagatatggacaaagcaatgagcctgatgccgggagcaaagaagatcaatgtgcatgcgtgctatgcaatttttgaagatggggagttcgcagaccgcgacaagctggagccaaaacatttccagaaatgggtggactttgcaaaaaaaagaggaatgggactggatttcaatccgacattcttctctcatgagaaagtaaaagacggactgacactttcaagcccggacgaagagacaaggaaattctggattgagcatggaaaagcatgtatccgtatttccaagtattttgcagagcagacaggaatcccatgtgtgatgaatatctggacaggagacggattcaaagatgtgcctgcagaccgtatgggaccaagagttcgttacaaagaatccatcgatgagatcctttctgagccatatgatccgaagatggtaaaaccttgtgtagaatctaaggtattcggaatcggagttgaggcatacacagttggttctgcagaatttgcactgagctatgcggcaatgaacaaagagaaatgcctgccgctgatggataacggacattatcatccgacagaagttgtttccgataagatcccggcgctgctgacattcttcccggaaatcgcactgcatgtgacacgtccgatccgttgggattctgaccatgtagttctgtttgatgacgagacaaaggaaattgcacaggaaatcgttcgctgcgaaggcggtcttgaccgcacttatattgccttggattatttcgatgcatccattaaccgtatctctgcatgggtaacaggattcagaagtttccagaaagcgctgctgaatgcactttgtacaccaagtgcactcttaaaagaacttcaggataccaatcagatgtcaaagaaaatggtggtaatggaagagtgcaagacacttccgatcggagatatctgggaggagtactgcagaagatgcaatgttccggcagaaggctggtttgaagaaatcgaaaaatatgagacagaagtgctcgtaaaaagagcataaatgaaaaaggatggaactatcgttttttacgatcagatcgtgaagcggcagttccatcttttttatttttgatataatttctttttttcacgaggagcgacacctgtaatttttttgaaagtccgattgaaatgagtcaggttggaaaatcctacttctctactgatttgagtgatattatagtcggtttctaacatcagcctctgtgcatggagaatgcgtgtggtattcaaatactgaataatcgttttcccggttgcattcttgaattcatggcacagatggtagggacttacatagagtatttctgccagttgattcacagagatatcttccatgtagtgattgtgaatatagtctacagcttttgcagaacgagtttttgggatgctttttacggcttcaaaatccagacgcagcatatttaacaggagtccgttcagttgattacagatataggcatcgtggtatttgcctggaacatctatttcatgagtgagagacaaaagaagagaaagaatctggtttggaatatatccttcgttcacaaaaagaagttctttttctgaaagcagttgacaaatggtgtcatttgcgatcaggtcaggagaaaaatataacacgattcgtttaaaaggcatgtccttttcaccataggagtgatgcatgatatgagggggaaacaaaacaaaatcattcgcagtaagatgataaatttcaccttctatcatatgcatccgctcaccttccagaagatagtataactcgaaaaagtcgtgaaaatgggactgggtcatattatcattcactccttccgcataagcgtaagcaattttttttccttgcgaaataataatcgcagcagtatctaacataatccatctcctttctgcacaaaatagaggtgtaaaaattgtgcatatctaacaaaaagcaaaatatataaatcccataagaagaagattagcataaaaaagaaagatgggcaagaaggaaaatagcaagaaaggtaaaataatggctggaatatcacaaaatgtgtctacctttaggtactctgtttttttataatatttttagaaattgaaaggaaaatgatttccgggaaaagaaaacaggaggagaaaagggatgaagatatgtttacaggcaggagctgtaaaacagatagaaaattatttttcgatatctacggatggcgtggagattcgtatctggtttttaacggattctgttgttcggattcgtgcaggttttgacggagattttgtggaagaatcttacagtctggtgacaactgcatgggaagatcgtatggatatgtttatgaaacattatcggaaacggattcagacagcagaagcccagttgacagatgggttagaaaaagcggtaatccagggaaaagttttgagagtagaagtggaaaaaaatccatttcgtatttgtgtttatgatgcagagaatatacagatccatgcggatattgtagatttagcctacatggaggacagcaataaccgtcgcattcacacaagtgagattacagaagatgattgtttttatggatttggtgagaaaagcggagagtttaacaaagctcagaaatttatgaacatgagcccgaaagacgctatgggatataatccgaaggagacagattctctttataagcatattccattttatatcaaactgaataagaaaaccaagaaggcagtgggatatttttatcacaatacgtatgagtgtgatttcaatatgggacgtgagaaaagtaattattggaagcctcacagcacgtatcgtgtagatggaggagatattgacctctttctgatcacaggaccacaggtgcgggatgtggtagagcgttatactgatttgacagggaaatccgcattgcttccgcgttacgcattgggctatctgggatcgtctatgtactatccggagttagagaaagattgtgatgatgcaatcctggaatttattgacacaacgaaagaagaagaaattccagtggatggcttccagctttcctcaggatattgtgcgattgagacagaagaaggaatcaaacgctgcgtttttacatggaataaaaaacgtttcaaagatccaaaagattttttcaaacagatgaaagaccgtgggatttgcgtatcaccaaatgtgaaaccgggaatcttgctgttgcatccaaagaaggaagagatgcaggcgaaaggaatgtttgtaagagcaagcagatcagaggagccgggaattggaacatggtggggcggaaaaggtgtttttgttgattttacaaagcaggaaacgcgagataactggaaagctatgttaaaagagaatgttctggagtatgggaccagttctgtatggaatgacaactgcgaatatgacagcatgatcgataaagactgccgttgtgattttgaaggaaagggagcaacgattggtcagctgaagtctgtgatgtcgaatattatgtgtcacatcacagatgaagctgtgcatgagatatttgaaaatcaaagaccatatattgtttgtcgttccggtcattgtggaatccagaaatatgcacaaacatgggctggtgacaatctgacatgttgggaagcattaaaatataatattgcaacaattctgggaatgggactttccggagtcgcaaaccagggatgtgatatcggaggattttatggtccggctcctgaggcggaactactggtgagatggatccagaacgggatctttcagccaagattttccattcattccacaaatacggataatacggtaacagaaccatggatgtacagcggctgcaaagaatatatcaagaaagcgattgaattccgttatcagttgatcccatatctgtattctttgatggagcgtgctcatgaaacagggctgccgatcatggaacctctttgcagtgcatttcagaatgatgagaaatgttatgatgaaggcgtggattttatgtttggagatgcgcttctagtggcaaacgtggtagaaaagggagcaaaaacccgcaaggtatatctgccggatggagaagtattttacgatttctacacaagagcgcgttatgaaggcggacagacaatcgaattcccggttgatttgagcagtatcccactttttgtcagaagtggagcaatcgtgccgatggcgttgaatcagatgaataatctgatgacgcaggaagcaacaggattgaagatcctttgtgcaccggataaagacagttctttcgtgatctatgaggatgacggagagacaatggactatgcaaacggcgggtatttaaaaactgttctggatatcaaggcaggagagcagacggtacttagcttccggaatgaaggggagtatgagactgcggtcgaggatatttatctggatgtcattcatcgggaaaaagctccgtactgggtaaaggcagacggacatgaacttcctcatttcctgcacagaaagaaatttgaagcagcacaagaaggttggtattacagccagagtctgaaatctgtgcagatcaaatataagaatccgaagaaggattatgaagtgattgtgtcatttgaacagtttgacatgatcggaatgtaaaaagaaaggaatgagacgagatgaaaaaagcaatttcgatgctgcttgtaatgggattgagcgcaggccttctggcaggatgcggagctaagagtgtgtcaggcagtgaagaagcaacggcagagaatccgatggtactgacactgtcacatggattgagtgagactcatacggtacatattgcaatggaagaatttgcagaaaaagtagaagaacgtacagacggcagaatcaaagtggaaatttttccgaacgcccagttgggaagtgagacagaatctatggaacaactgacagcaggtgtcattgccatgacaaaggttgcgtctccgattttggcaacttatgaagaagggtataatacattcggacttccgtatatttttgacgataccgaggacttctatcatgtaatggattctgatgagatgcatgatttcttcctttctacagaggatgagggatttgtgacactgacgtattatacatctggagcacgttctttttatacaaaagacaaagcaatccgtacaccggaagatttaaaaggattaaaaatccgtgtacaggatatggagtcccagacagatatgttggatgttatggggggaacgccggttgcaatgtcttatggtgatgtgtatacctctcttcagacggggatcattgatggaacagagaacaatgagacggcgctgacaacgggaaaacatggagagatctgtaaagtatattccaaagatgaacatgcgatgattccagatgttatggtgatgagcgcaaagatatggaataccatcagcccggaggatcagcagattattttggaagcggcacaggagtctacagacagccataagatattatgggaagaagcgattaatgatgcggtcgaggaagcgaagaacgaaatgggtgtggaatttgtagaggatgtagataaggatgcattccgtgaagcgaccaaaggaatgatagaagattattgcgagcgctatccgggtgttgcagagcttctggatatcattgagtctgtaaagtaaggaggggaaaccatgcaggcaacgttgacaaagataaaaaaaggaatgaattttctgttatccagaattgcggcagtgcttttgtctgccatgacgcttctggtattgtatcaggtatttacccgttatgtgctgaacagcccggcggcatttaccgaggaaatcgtgaggtatctgttgatctggactggatttatcggtgcagcttatgcgttcagtacaagacagcatatggcattggtacttgtaagagacaggttgtctccaaatcgaaagaaagtactgatgacagcgattgatgtattgattcttgtatttgcattgtttgttattattattggaggaactaaactggcgctgagcgcggtgaaagaatattctgcacttctgggaatttccagagggcttgtatacagtatggctccgatttctggagtgttcatcattctcgcgcagattattaacatctatgaagatgttaccggaaacgtgattgaagaaggaggagtagagtaatggatattgccgtaacgactatacttttgttcgctgtatttggaattcttttgttcgtgggatgtccaatttctgtcagtatcgtagtttcatcaattgtaacggccttgtcttctctgtcgtgggatcagattacatttatcaccatgcagaaaatgaacggaggagtggagagtttctcactgttggctgtaccgctgtttattttggcaggaaatattatgaacaatggtggtattgcacgcagacttgtaaactttgcaaaattattctgcggatggataccaggatctcttgcccaggcaaatgtacttggaaacatgctgttcggagctctttctggttccgcagtagcagcttcttctgcaatgggaggatgtatctacccaattcagaaagaagaaggttatgatccggcatttgcaacggcagtcaatattgcttctgcaccgacagggcttctcattccgccgacaagtgcatttatcgtatattcaaccgtagcggggggtgtatccatttccgctctgtttatggctggttatattccgggaattctgatggggctgggaacaatgattgttgcctttatttatgcgaagaaacacaaatatccgacaacgggatttgtaccgatgaaagaagcattaaaggtgacatttgaagcaattccaagtctgcttctgattgtgatcgtaatcggaggtattgtaggcgggatctttactgcaacagaaggagccggtgtctgcgtactgtactgtttgattctgtctattatctataaaagcattgatatgaagttgtttatgaagattttgctgaacagcgctgcgacaagcggtatcatcctgttcctgatctctgcttcttctgcaatgtcatgggtcatggcatactctggaattccggcagcgatcagcagtggtttaatgtccattaccgacaataaatacatacttcttcttttaatgaatatcattttgttaattgttggtatgtttatggacatcacaccggcaatcctgatttttacaccaatctttttgccgattgcagagagtcttgggatgtcctctatccagttcggcgtaatgttgatattcaacatgtgtatgggaagtatgacaccgccggtaggttcggtattgttcgtatcttgtggtattagtaagattaccattgagcaggtgacgaagacgttgcttccgtattctgcagtattgcttggaatcctgctggcagtgacgtatgttccggcattgtcaatgggaattccgaccttactgggacttgtataaactgatgagtgaaaaagcctgattaccaatcgggcttttttaaaagtgaaaggagtgaaattatgttactgagaaaattttgcggaatagagaaaacagataacggatatttgattcatggagatgcaggggatatcaagttggtatttatgaccgatgatatcatccggatccgggtatcttttgatcgcaaattcaaggaggcttcttatgcacttgttacaactgcgtgggaggatgagctggatgaactgtttcaagaggaacgcacccggattcaggcgaaagatgttgtatgcgaagaaaaggaagatgcgctgatatttcatacaactgcattgaaacttgttatgaaaaagcagccgattcagtttcttttgtatgatgcggaaggaaagctgatctataatgatctgaaggagcgcgcatttgatcaggatcagcttggaagggtgacacattattcagagattcatgcggacacagatcatttctatggattcggagaaaagactgggcatctggataagaaaggacgtcatttgagaatgtcaccgaaggatgccattggggcagatccggaatttggggagccgttgtacaaacatgttccattttatattcgtgtcaatgaagaaaatcttcatgcgctgggattgttttacaataattcctatgacgctgtatttgatatgggaaatgagcgaagcggatattgggacagttactgttattatcaggcggatggcggagatatcgacttgtttctgatcaacggtccgaagatggcttccgttttggaacgttatacctatctgaccgggcggcaggcaatgccgacgaagcagtctctcggatacacagcttctacgatgtattacgcagagttggaacagaattgtgacgaagagatttacaaagtcattcagaaacattttgatgagaagatttatattgataatttctggctggcaagcggatactcttcaggagaagaagacaacctgcgttacgtatttaactggaataagaagagattcccggacccggaaggattctttgagaagatggagcaggagatgggcatcaatgtgattccgaacatgaagccggggatcctgaaaaaccatccttacagaaaagtgtttgaacagtatgatgcatttgtgaagacaccagacaaagcggaagattatgtaggacgatggtggggtggtgaaggacggtttgtagacttcacgaagaaagccggacgtgatgcctggaaagaattgctgaagaagaatctgatggcgaaaggaatgcggactgtctggaacgataactgtgagtatgatggagtagaagacagaaatgcctactgtgaccatgagggaatgggtggcacgatggcggaactgaagatcatccagtctaatatgatggcatataccggaaaagaggcattaaaagaagtatatccaaaagcgagaccttacattatcaatcgtgccggttatgccggaatccagcgttacgcgcaagtttgggcaggagacaacttaacagactggagaaccgtgaaattcaacattgctaccattatgggcatgggattgtccggaatgtccaatgcaggatgtgatatcggtgggtttgcaggaccggcgccgggaggggaattattgcttcgctggatccagaacggtatcttccagcctaggttctgtattaattctgccaacaatgacaataccgtaacccagccgtggatgtatgaagaaaatctgccgtatgtacaggctgcatatgcacagcgttatcgtatgattccgtatctttattccgtaatgagagagtctcatgagaatggaatgccggtgatgcgtccgttgttcctggagtttccagaggatgtgaagtgttatcgtgatcagaatctgacctttatgtttggaccgtctgtgctggttgcaaatgtggttgaaaaaggcgcgattacaaggacgatttatctgccgaagggaacgacatggtatgatatgaatgacaacttcaaagcatacgaaggaggtcagacaattgaacttccggtagatttaagctcaattccgatgttcttaagaggttccgctgtctatatgacaacggaagatatccatcatattacaaaagatacgatgaaagcactggatttgttcgtaagctgcgaagaggatgcagaatttacatattatgatgatgatggatggtcaaaagagtacgaggaaggcaattttgcagagacaaagataagtgtcaaggcaggcgacagaaagcagatccattttcataagaatggtttttatcaggaaagctgggagaatttgaatttaaatgtggtaagtaaggaaaaaggcgcttactgggtaagtgtggacggagagaagattccgcgcttcttgatccgtgatgcctttgatgaagcagagacaggctggtattatgatatgtcagaccggattgtcaaagtgaagtgtaaaaagccgcagaaggatgattttgaaattgtcgtaagctgcgagaagtttgacctgattggaatggaaaatgaaatataagtaatgctgcttaaagttgcataagatgagggtatcgcttgatcatttaacttggggatcgagcgatgccctgtttatatatgaagaaaatttagacggattcttttgtcttggtgtatcaaaacttattcagattcttttagttctggatgtaattttgcaaaaatgacatcctcattgtaatcaggtgcagattgaactgcaatgttgtagaccggctgaatgacagagatatcctcctccaacatttctgcaatttcagctaagggaatctgtttttgtgtttttttacagacctgagtgattaaccgcagcgtggatccttcttctttgcttatcctccgtgtttcttgtacatcatatgcttcaaagctgtcaaataacatatcaaaatccctccgttttatttgatctgtaaagtgttccgtttttcaagccagctcaaaaattcgccggacgagcggtttaagatcagttcctccggaaattcagcgatgcggatcagttccattgcatgatcaaaatttccgatatgtccggttccgtgactgtcactggacaacaggattggatagtggaaatgtttgcacaggttgagcagcatcatatcgttaaaacgggtatcgccccggtagccgtccgggcgcagtgagctgtcattgagttccagaatgacatgatattccattgcagcttctaccagtgcaaggtagtctaccgggaattttacatcatcacaatgtccgatgattcgtacatatggttttttcattgcttctatataagaacgtgtattttcttcctttgatccggggcgcttagcagggcggtgcaggctggcgatcacataatccaggtgctttaaaatttcatcctcaagatccagttttccgtgattgtctaaaatactgacctcggcaccgtacagcatgcggattcccatccggtttttaggtgcataagtaagatttcggaaatatgcaggttttccgccgccaagtgtggcaggaccatggtccgaaattccgagcatatttaaatgctgtgtacgtgcagttttgaccatatctgtgatcgtggcagctgaaccatgtccgctggcgattgtatgagtatggatatcaaattcaaaatgtgacatgaaaagtcccacctttccagatttctgtttccagtatgatggatttctgcagttttgtcaatgcgctgaggtgtggttttttaataaaaacaacaaaaaccacataaaataaattctgatttattttgatttaaaggataaagacgggaaatgatattgtagttttgttgacttctgctgttgtgtaaagtataatgacgttaactggatagagagagggtttctttagaaagttaatacgaatatgagaaaggagcaacaaggcagatgggattgtataattatgacagcactgagattccaaggtcagacagaattccgaagctggtagaaaatctgtatgcaaagatgcctgagattgagtctgcaagagcaattttgatcacggaatcttacagacagacagagaatgagccgatggtgatccgcagagcaaaagcatttgcacacattcttgagaatattccgatcgtcatccgtgacctggaactgattgtgggaagtacaacaatcgcaccgagaggatgtcagacctatccggaattttcttatgaatggctggaagcagagtttgatactgtggagacaagaagtgcggatccgttctatatttcagaaaagacaaagcaggagttaaaagaagccaatgcttactggaaaggaaaaacgaccagcgaactggccacttcttacatggaaccggagacactgctggcaatggaacacaatatcttcacccctggaaattatttctataatggtgtgggacatgtgaccgtaaaatacggagaggtgcttgcaatcggattttccggaatcaaggcaaaagcacaggcagagcttgataagctgtgtctggcagatggagattatcagaagaagtcccgttttctggaggcagtgatgatcagctgtgatgcagccatcgaatatgccagaagatatgcaagactggctttgaaagaagcagaagaatgcacagatcctgtccggaaaagagaattgcttcagattgctcagaactgtgcaaatgttccggaaaaaggtgccacaggattttacgaagcctgccagtctttctggtttgtgcagcagcttctgcagattgagtccagcggacattcgatctcaccgggaagatttgaccagtacatgtatccttattatcagaaggacatggagagcggcaagatcacaagagagtttgcgcaggaactgatggattgtatctgggtaaaactcaatgatctgaacaagtgcagagatgcagcgtcagcggaagggtttgcaggttacagtctgttccagaacctgattgccggaggacagaatgaagaaggaattgatgtgacgaatgacctttcctttatgagcattcaggcatccatgcatgtatttcttccgcagccgtcactttctgtgcgggtatggaacggaacaccacacgaattcctgatcagggcggcagagttgacaagaaccggaatcggacttccggcatattacaatgacgaagtgatcataccgtctctgatgagcagaggactgactctgcaggatgcaagagattataacatcattggatgtgtggaaccacagaagtccggtaagacagaaggatggcatgatgcggcgtttttcaatatgtgccgtccgctggagctggtattttcgaatggaatggacaaaggtgtccgcatcggtccggcaacaggcaatgtggaggacatgacgacatttgagcagttctatgatgcatataaaaagcagatggattatgcgatccagcttttggtcaatgccgataatgccattgatatggcgcatgcagaacgatgtccgcttccgtttttatcttccatggtggatgactgtatgaaagtcggaaagacggtacaggaaggtggagctgtctacaactttaccggtccgcagggatttggggttgccaatatggcagattccctctattcggtaaaaacgcttgtctatgatgagaagaagatcacgatgggagaactcaaagaagcgcttgcaacgaattacggcaagggacttggagcggaagatgtggctgccatgacggctaagatcgcgaatgagctcaaagaagccggaaagacgatcggtgaaaaagaggtcgctgcaattttaaatactgtagttgcggcatccgaagcaccagaagtaaaggcaaacggggaaagaatcctgaagctgatcgaagaagtgccgaaattcggaaatgatatttcggaagtagatgcatttgcaagagatgttgcctacacctatacagaacctcttcagaattacaaaaatccgagaggtggttccttccaggcggggctttatccggtatctgccaatgtgccgctcggtgcacagacgggagcgactccggatggacgtctggcatatcagccggtggccgatggggtgtctccgtctgcaggaaaagatgtcaatggtccgacagcggctgcgaactctgtttccagactggatcattacattgcgtcaaacggtaccttatttaatcagaaattccatccttctgcactcagcggaagaaatggactggaaaactttgtagggctgatccgttcttactttgatcagaagggaagccatatgcagtttaatgttgtcagcagagagacacttttggatgcacagaagcatccggaacagtacaagcacctggtcgtacgtgtggcaggctacagcgcattgttcacaacactgtccaagtcactgcaggatgacatcatccgcagaacagagcagggattttaggatacaggcagaaaggtgtgcgacatggaagattacttaaaaacaaaaggacggatttttgatatccagagatattcgatccatgatggtaacggaatccgtacgatcgtctttttaaaaggctgtgtgcttcactgcagatggtgctgtaatccggaatctcagtcatatgaaatcgagactatgatggtacagggagagccgaagatcatcggagaggataccacagtcggcgaagtgatgaagacggtggaaaaggacagaacatactacagaagaaccggcggggggctgactctgtccggaggagagagcctttgtcagccggaatttgcaagagatatgctgcgggctgctcatgaggccgggatcacgacagcgatggaaagtatgggatgtgcagattacagtgtgatcgaggagattcttccatatctggatcagtatctgctggatatcaagcatatgaattcgaaaaagcatgaagaatttacaggacgcggcaatgaactgatgctggaaaatgcaaaaaaaattgccgcttccgggatgacagagctcagtatccggattccggttattccgggattcaatgatacaccggaagaaatcagggatattgcagtatttacgagagagcttggtcatgtaaaacgactgcacctgctcccttatcacaggttgggacaggacaaatatgacggtctgaacagaccttatcttatgggtgaggttaagccgccggccaatgagaaaatacagatgctcctaaaagtggcagaagagttttcaggggttgagtgtcagatcggaggataaacagaaaaacaacaaaaacaacaccttaaaaagttgactgttgtgggtttgtgtggtaatataagacaagaaccaacaagaatcaaaaggtttgttttaagaatccaaggaggaaaaaaggatgcaaaacgaatacgaaatcaaaaaagagatgtgtgaaattgggaaaagagtttataatcgtgggatggttgctgcaaacgacggaaacttctccgtaagaatcagcgagaacgaagtattatgtacaccaacaggggtcagcaaaggttttatgacacctgattatatttgtaaagtagacctagacggaaacgtacttcaggcaaacaaaggattcagaccttcttctgaaattaaaatgcacttacgtgtatacaaagagagaccagacgtaaaatcagtagtacatgcgcatccgctgtatgctacaacatttgcaatcgctggtattcctctgacacagccaatcatgccggaagcagttatcgctcttggatgtgttccgatcgcaaaatacggtacaccttctacagtagagattccggatgcagtatctgagcacctgcagtatttcgatgcagttctgcttgagaaccacggagcactgacatactctgattctttactgaatgcttatcacaaaatggaatctgtagaattctatgctcgtctgttatggcagacaatgcagattggtggaccacaggaactgaacaaagagcaggttgaaaaactttatgagatcagaagacagatgggactgagcggaaaacatcctgcaaacctgtgtccaaatgcaaaagcaggaaaaccaagctgccactcatgcggaggcggatgtggtgctgcaaaaacagcagagacaccggatgcagatctggtagcatctatcacaaagaaagttatggatcagttaggactgaactaatttcagaaagaggactgctatgaacgaacaggatatttccaaagctgtggaggcagtgctgggacaaatgaatggacagcatgcgcatcatggggaaggacatgtctgtcggtgcaataagaacaagatgactttaaaactggcaaatgctctgattgaaaaagtgaaagcatatgcacagaaaatgggagtcaatgttgtgattgcagtgtctgaccaggcaggtcgccctgttgcagtccagtgtatggatgatgcgtacatagcaagctttgatatagcacttaacaaaacatttacttcagcgagcctcaagatgtcaacggaagaacttagtcatttaagccagccaggacagtcgctgtacgggatccagtttaccaatcagggtaagatcgtgatcttcgggggcggagagccgctaaaagcagatggcaaaataatcggagctttgggcgttagtggaggaagtgctgaagaagacactgcgatagcagcctatggcaaagagatttttgaggaggtattggcgtgtctgtaaatgaaaaaatggtacaggacatcgtacaggaagtggtagctaaaatgcagatttcttccgatgtatctggaaagaaaggcgtattttctgacatgaatgaagcaatcgaggcttctaagaaagcgcagaagattgtagccaggatgtctatggaccagagagaggcgatcatttccaacatcagacagaagatcaaagaaaatgctgagattcttgcacgtatgggtgtcgaggaaacaggcatgggaaacgttggacataaaattttaaaacaccagctggttgcagagaagactccgggaacggaagatatcacaacaaccgcatggtcaggggacagaggacttacactgatcgagatgggaccgttcggtgtgatcggagcaatcactccatgtacgaacccgagtgagacagtactctgtaatacgattggtatgctggcaggaggaaatacagtggtattcaatccacatccggcagcgatcaaaacatctatttatgcagtgaatctgctgaatgaagcatctgtagaagttggcggaccggataacattgcagtgacagtggagcatccgacaatggaaacaagcgatgttatgatgaagcacaaagacattcatctgatcgcagcaaccggaggtccgggtgttgtgaccgcagttctttcttccggtaagagaggaatcggagctggtgcgggaaatccgccggcgttggtcgatgagacagcagacatcagaaaagcagcagaagatatcgtaaacggatgtacattcgataacaatcttccatgtatcgcagaaaaagagattgttgcggtagattctatcgcagatgaacttcttcattacatggtaaatgaacagggatgttacatgatttccaaagaagagcaggatgctctgacagaagttgtgttaaaaggcggacgtctgaacagaaaatgtgtaggacgcgatgcaaagacacttcttggaatgattggaatcacagttccggacaacatcagatgcattacatttgaaggaccgaaggaacatcctctgattgcagaagagctgatgatgccgattcttggagttgtaagagcgaaagattttgatgatgcggtagaacaggcagtatggctggaacacggcaacagacattctgctcacatccactctaagaatgtagataacattacaaaatatgcaaaagcaatcgatacagcaatccttgtgaaaaacggaccgtcctatgcagcccttggattcggcggagagggatattgtacgtttacgatcgcaagcagaactggcgaaggacttacaagcgcaagcacattcacaaaaagaagacgctgcgtaatgacagacagcctgtgcattcgctagaaggatgcagacagtttcgtcaggtagtataaataggaggaaacaaacatggaaatgaattcagcaagtgtggaagcagttgtaaaacaggttctggaaagcatgctggaaggtaaatcagcagtaaaagcacctgtagcaaaagcaaacacaggaagcaatgaaattccaaagacagcacacgtagcaatgctgacagctctggaaaattatgaagtaaaagaattcccaatgccggaagttggtgacggagacattcttgtaaaagtagaaggatgtggaatctgtggaacagatgcacacgaattcaaaaaagatccatttggactgatcccggtagctcttggtcacgagggaacaggtgagatcgtaaaaatgggtaaaaatgtaaaagcagacagcgcaggaaaaccattaaaggttggagacaaagttgttacttgtatgatcttcaaagacaatccggacatcacaatgttcgacctgaataaacagaacgtaggtggagcggatgtatatggactgcttccagatgatgatatccatctgaatggatggttctcagattatatcttgattcgcgaaggatctacagtatttaatgtaagcgacctggatctgaaatccagaatcctgatcgagccttgtgcagtattgatccatgcggtagagagagcaaagacaacaggaatcttaagattcaacagcagagttgttgttcagggatgtggaccaatcggtctgatctgtatcgcaattcttcgtacaatgggtattgagaacatcgtagcagttgacggagagcagaagagacttgattttgcaaagaagatgggggcagaaaaatctgtaaacttcaaagatttccagggagtagaagctctggcaaaaggagtagaagatgcatttggaggatatccggcagacttcgcattccagtgtacaggatcaccgattgcacacgcaaatatctataaattcatcagaaatggtggagggctttgtgaacttggattcttcatcaatggtggagatgcaacaatcaacccacacttcgacctgtgttcaaaagagatcacattggtaggatcctgggtatatactttaagagattatgcaacaacatttgatttcttaaagagagcaaaaggaatcggacttccaatcgatgagctgatcacacatgaatacccattggaggagatcaacgaagctcacagaacaaatcttgcaatggaaggcctgaagatcgctattatcaataaatagtgacggccattccagagaaggagaatggatatggcagaagcagtaggcatgcttgaagttttcggtctggcaacagcctttgcggcagcggatgctggctgcaaggcaggaaacgtctggctggagaattttgataaaaacaaaccgggcaatgcagatgaattaccggtaccgctgatcgtgatgatcaagtttcgaggaagtgtctctgacgtgcaggcagcgctggaagcggcaaaagccaaagcagagcagctggcaggtgttgtgaatgaatatgagattgcaagaccgacagaggatacggaaaagatgttgaagatcagcgcgttcgacaaaggaacaccacacaaaataaacaaagaagagattgaagagatttaggaggatttaaaaatggcaatggcacagcaggcattaggaatggtagaaacaagaggacttacagcagcaatcgaagcagcagatgcaatgacaaaagcagctgaggtaacattagtaggaacagaaaaaatcggatctggactggtaacagttatggttcgcggagatgttggagctgtaaaagcagctgttgaaacaggagcagatgcagcaggaagacttggagaattagtagcaacacacgtaatcccaagaccacacaacgatgtagaaaaaatccttccaactgtataattaaggactacagaaagtaaaggagaagtctcatgggacagtgttatggattttttgaaatcccgagtgtaacagcggctatcgatgctgtcgatattatgtgtaaaaccgcagatgttgagatgatcacctgggagaaaaaactcggcggacgtcttgtgacgattattatccgtggcgatgtatccgctgtaacacaagccattgaagctgccgcagcgaatggaatcaaagagccggtatgttatacggtgattccgagtccccatgaagagatcatcaaattgattaataagagcgtcaatcggatacgttaggaggcagcccttatggcagaggaaaagaaaccggcagagaaggaaagtgcaaagacaactgcaaagcctgccgcaagaaagaaaacaactgcagccaaagcgccggccaaaacggtacagagagtaaggaagagcgcgaaaaaggcagagcaggcggaaacaaaagtagaattgaaggaggaacgaagaatggcacaggaagcattaggaatggttgaaactagaggtcttgtagcatctattgaagcagcagatacaatgttaaaagctgcaaatgtagttttggtaggaacagaaaaaatcggttccggactggtaacagtaatggttcgtggagacgttggtgctgtaaaatctgcagtagaatcaggtgcagaagcagcaggaagacttggtgaattagtggcaacacacgtaatcccaagaccacacacagacgtagaaaaaattcttccggcaatcaaataagttttggtttcaaaaaaatgcccgaatcatttcagtcagcggtaacggttgtaaatgagagcatatgcgagcggatcagctcgcatatgttcttgtgctacagccggatttaagggcgggcatgcattgatgaggagaattaatatggacaataataatgtagctttgattacaaagatggttctggaagctgtagaaaaacagaaatcttccgaaaaagaaccgggatatctggttccggtaggggtatctgcaagacacattcatctgacacaggagcatgtggaagcattattcggaccaggatatcagctgacgaagaaaaaagaactgatgggcggacagtttgcctccaatgagacagttacaattgtcggtctgaagctcagagcaatcgaaaatgtaagaattctgggacctgtaagaagcaaatctcaggttgaggtttctgctacagatgcaattaaacttggagtgaaggctccgattcgggaatccggtaatgttgcaggaagtgcaccgatcgcagttgtcggaccaaaaggtgcgatttatctgaatgaaggatgtatcattgcaaaacgacatattcatatgccgccgaaagacgcaatggcagccggagtgcatgacggggatgtggtatccgtgcaggcggagaatgaaagaggcactgttttcaatcatgtacagatccgtgtggatgacagctttacgctggagatgcatatcgatactgatgaagcgaatgcagcgaagattgcgactggacagactgtaagaattataaaatagatacttacattagaaaatcgcaagaggaagtgaggaaagtatgatagcaggaaaagtagtaggaagtgttatctcgacacggaaatgtgaaaatttggtcggcaataaattcatgatagtggatgtgctggatcatatgcagacatctggaaaacaactcattgcgattgacaagatcggagcgggaataggagagtatgtgctggtggcacagggcagtgcggcacggattggctgcggcatgagcgatgctcctattgatgcagcgatcgttggaattattgacgatggaacaggactggagtagtgaaattatggatatgaaagaattaagcagcatattgcagcaaaacggaattgttggtgcaggtggtgcaggattcccgacttatgcgaaactggatcagcgtgcagaaacaattatcctgaactgtgcagaatgtgagccactactgagattacatagacagttattggaaaaatatgcgcgtgagattgtggatacatttcacctggtaggccaggctgtaggcgcaaaagaagtcattatcggaatcaaaaaagcatataagcagacaattgaggcagtcgagagtgtaatcggagaatatccggaagtcagactgggactgctggatgaagtatatccagcaggtgatgaggttgttctgatttacgaagtgacaggaaaggtcgtacgtccgggaggacttccgatcgagagcggcgttgcggtattcaacgttgagacgatctacaacgtatggcgcgctatgaatcagcagactcctgttgtagataaactggtatccgttgttgccgaggtagagcatccggtgacagttcgtgtaccgattggaactacaatcgaggaagtcgtggcacttgcaggcggaacaactgtaaaagatccggtatattttatcggaggaccgatgatgggattcatcggaagcggttcgcagccggttacgaaaacaaccaatgcggtactggtattgccgcaggatcattatctcgtaaagagaaaaagaagcaaatcttccattgacatgaaacgtgcggctgcatgctgctgtcagtgttcaatgtgtacagatttatgtccaagacatctgcttggacacccgattcagccacacttgtttatgcgtgcggcaacatgcaaagacgttcagcagccgaatatctttatcaatacattcttctgctgttcatgtggtgtctgtgagttatattcctgtccgcaggagctttctcctagaacactgatgctggaatacaaaaacggacttcgtgcgaacggacttcgtgcgccggaagtgacagcagtaccggtaggagaagaaagatcttacagaagagttccgatggaacgtctgatgtcaagactggacttgacaaaatataacaaagaagctccgctggatgaatccgtgatccctgtaaaacgagtgaagatcatgttgagtcagcatatcggagcgcctgcttcctgtgttgtaaaaccgggagatatggtagtcaaaggacagatgatcgcagaaccggcaaagggcttaagtgttggaatccacgcttctgtcaatggtctggtaagcgaagtaaatgagaaatatgtagtcatagagacacaggaaggacgtgcagataatgagtaaggcaattggaatggtagaatataagactacttcagcaggtgtcgtagcggcagattctatggtaaaaacttctgaagtaagcattatcgaagcgcagaccgtatgtccgggaaaatacattgtaattattacaggagatttaagtgcagtaacttctgctgttgacaatgcaaaaacaatgcatggaaaacatctgatcaacagttttgtacttggtaatccgcatgaatccattttccctgcaatttatggagctgcagaaatcaaggatgtatcagcactgggtatcattgagtcctatgatgcatcttcgatcatcgtggcagcggatgaagctgcaaaaacagcaatcgttgatctgatcgaagtacgccttgcaagaggtatgtgcggaaaatcttatctgatgctgacaggtgaggttgctgctgtagaagctgcgatcgacagagcaaaagaagcagtatctgacgatggtatgtatctggattctgcagtgatcgcacatccggatgcacagattcgcgacgcaattttataattaagaattcagccatgacaagtatcagaaaacagaggacgtccagattagaggatcctgttttctgatatttgtatacggcaataacaaaggttttgagacagaatttatcaggaggcaacacgatgctggcaattgaaagacgtaatgaaattctggaaaaactacagaccgaccggagggtagtcgtgagtgagttaagccagatttatgaagtgtcagaagagacgattcgaagagatctggataagcttgtgaatgatggctacgcaatcaagagctacggcggtgctgtgattaatgagaatatgaatatagatctgcctttcaatatcagaaagaaccgcaatgtgatcggaaaacaacggattgcagagctggtggcaaagatcgtacaggatggagacagcattatgctggatgcgagttctaccgcagtttatattgcaaaaggactgaaagataaaaagaatctgacgctgatcaccaattcaatggaaattgtgatcgagcttttggatatgtcagattggagggtattatctaccggcggagtatcaagagagggatcgtttgcccttgtgggaacccagacgaaccggatgcttcagtcgtatcatgcagacaaagcaattatttcgtgcaaaggcctggatatggcagcaggacttacagattctgatgaacttcttgcagataacaaacgaacaatgctggaaaatgccaaggagcgcatccttgcaattgacagcagtaagtttggggcgacagcctttatgacggtcggaagattgaaagatattacaatgatcgtaacggatgaaaagcccgagatgaagtggctgaaagaattcaaaaagttggggatagagtgtatctatccagaatagaggaaggacgctatgaagagctttgatataaaaacaaaagtatactttggggacaatgcattagaccgtctttcagagatcccatataaaaaagtactggttattacagatccgtttctggcacagagcagtatgatcaatctgatcacagatccattgaaaaaagggcatattgagtatgacatttttcaggatgttgtgccggatccgccgattgaaaaaatcagtgaaggcgtaaaaaaattactggcgtataaaccggaagcaattatcgcagtgggtggggggtctgccattgattcttccaaatcaatccgggaatttgcagtgcggatcgagcactacggcgatgtagggctgatcgcgattccgacgacaagcggtactggttcagaggtgacttcctttgcagttgtatcggatccggcagagcagagaaaatatccgctggtatccagagatctgacaccggatgaggcaattctggatgcagagctggtaaagagtgtaccgcctgcagttacagcagataccggaatggacgtgtttacccatgcgcttgaggcatgtgtaagtacagacagaaatgattttgcaacggcactggcagaaaaagcgattgaaatttgcggagtatttctgctgagagcctatctggatggaagtgatacgcatgcgcgtcagaagatgcattctgcatcctgtctggcaggtcttgcatttaattccgcttctttgggattgaatcacggaatggcacatcagcttggtgcaacattccatattccgcatggtcgtgcaaatgcgatgctgctgccgcatatcattgagttcaacagtgatatcaacaagcacagtaaaagtcaggcaaaatatctgcctgctgtggaacgatataaaacagtagccagaattttagggctgagcagttataacacgattatgacagtcagaaaccttgtgaactgggtacagtttatgctgaaagagatggatattccgttgtcgatctcgcagatgggcaagatctccaaagaagaatactttgcagaaatcgagcgtatggcagaagcagcgctggcggatggatgtaccgcaaccaatccaagagtgccaagcaaggcagatgtcatgaagatttacgaaagtctctggtaaaaacagagaagagaatgtgaataaaagtataaaacgagcagaaagaagtggataacttttttctgctcgttttatttagtgctaatttgtgttttacgtaaagtaaactgtttttatattttaatttagaaatcataccagcagcttaaaagctctggaaaataggtggaaaaaattgcttgcgataaccacggttcgtcaacaccgcaagaaccatccgaaatcccataaaaaccgcaattttactcaactttttcagatataattgtgctatagtaaacacaatcatatgaatacaggaggaacatggcatggtaagaaaaggattcaagatgaagttatatccggatatggcagaggagtacgaaaagcgccataacgaactctggccggagatgaaagacatgatccacgaatatggcggacgcaattatacgatttttctggatcgtgaaaccaatgtactgtatggatatattgaagttgaggatttgaaaaaatgggacgagagcgcagatacagcaatcaatcgcaaatggtgggattttatggctgatatcatggagacgaaccaggacaacagcccggtgtgtacagatctccatgaagtcttccatttagactgatcacacgagcagatctttttgcatgtctcggaaatctttgggagaaatcccgtattcttttttgaatgcccggtaaaaactggagtagtcaccgaagccgaaggtctgataggcttcggtgatactcatttgtccgagaatggcttccctgcaaagggcaagccgtttttttgtaatgtactggtgaatcgacaatcccagattatccttgaatacatgggcaatgtggtatttgctgacaaaaaattctccggcaagcttttcaagggagagatcttcgtcaagatgttcctcaatgtatgcagcaacattctgatacagggattcctcggtccggcttttttgtggatgaagccgttcgtagacgagacggttcagatataaaagcagatcattgacgtaaagcggaatctgggcatcccgtccaaaacggtcagaacgcacttcttcgatcagacgcagcagctttgactggatagcattgaatgtgatcctgtctgttggaaaaaagtaattctgactgacctgcacatgctgcattaaataagcgtaatctttggaaatctgcagcagatggttgcagtattcctgactgatccagaacacaaaacgccggtagggagaggccgtgctgtgaatgatcgggcgatgtgggatatgtggcgggacgagcatgatatctccgaaatgaatcgggtaaacttcggttccgatctgaatgctgacatcaccttccataaaaaaataaaattcataataattgtgggaatgcaggtctactttggacagattgtggtcattataatagtaaagttcgaaatcccgtgacagcatatgctgtcttgtaataaatgctgtctgcagattttttttcataaaaactcctttaaaagtatgcgctgatttttgcagcacatgaatttctttttttagagtagcatgaaacaacaagatttgcaatgtatacaacaactaagtcaatggtattttagacagtattttttataatgaatgtaacagagttactgttcacaccagatgttgaatataggttctgaaccgtcatgcttgcatggaaaggaaagaacctatattcaacatctggtggaaccagtcaccgcccacgcataagcaatctagcaagaagtgcggtactggagtgcgcaagcacgacgattgcgcatgtatgggtggtgatggtgtgaacagtaatgtaacaacacgatttcagaaaaggaaggtatgataactatggaaatgacactcagatggtatggagctaaatttgacacagtgactctgaagcagattcgccagatcccgggagtaacaggtgtgattacaacactgtatgatacagcgccgggagaggtatggagccgtgagcgtatccgtgcaatgaaagaagaagtagaggcagccggactgcgtgtagcaggtatcgagagtgtaaatgtgcacgatgcgatcaaaacaggagcaccggagagagaccagtatatcgacaactacatcgaaacactggaaaatctgggaaaagaagatattcacctggtatgctataatttcatgcctgtatttgactggacaagaacagagctggcaagaatgcgtccggatggttctactgtacttgcttatacacaggaagcagtagatgcactggatccggaaaaaatgtttgattctatcgcaggtgacatgaacggaacggtgatgccgggatgggagccggaaagaatggagcatgtcaaagaactgtttgagatgtacaaagagatcgatgatgagaaactgtttgaaaacctgaaatatttcctggagagaattatgccggtttgtgacaaatatgacattaacatggcaattcatccggatgatccggcatggagcgtattcggactgcctcgtatcatcatcaacaagaagaacattctgcgtatgatggaaatggtagacaacccgcacaatggtgtgacattctgttctggttcttacggaacaaatctggagaacgatcttccggatatgattcgttccctgaaaggaagaatccattttgcacacgtgcgtaacctgaaattcaactctccgacagacttcgaagaggcagcacatctgtcttccgacggaacatttgatatgtatgagatcatgaaggctctttacgaaatcggatttgacggaccgatccgcccggatcacggacgtatgatctgggatgaagtggcaatgccgggatatggactttatgaccgtgcactgggggcaacttacttaaatggtctgtgggaagcaattgagaaaggagccagataatcatgagattaagtgcagaaggactgaaagacagagcaaaatgggaagaggcgggatacgcccttccaaaatttgacagagaaaaagtgacagaagcgacaaaagaaaatccgttctggatccatttcggtgcgggaaatattttccgtgcatttcaggcaaatgtagtacagaacctgttgaatgacggcattctggatcgcggtctgatcgttgcagagggatttgactatgagatcgtggaaaaaatgaaccatcctcatgatgattacacaattcttgtgacactcaaagcagatggaaacattgagaaaacagtagtcggaagtgtggtagagtctttgactgtcaacacagaaaatgcatctgattttgcacgtctgaaagagatctttgcaaaagactctctgcagatggtgacatttacgattacagaaaagggatacagccttgtaaacggaaaaggagaactgctttctgatgtagaggcagactttgtaagcggaccagaagctccgaagagttacatcggaaaagtagcagcgctcctttatgcgagatatcaggcaggagaaaagccggtggcaatggttagcatggacaactgttcccacaacggagataaactgtatgcagcgatcaatacatttgcagagaaatgggaagagaacaaacttacagatgcaggattcagagcatatgtaaactgtaaagaaaaagtgacattcccatggaccatgatcgacaagatcacaccacgtccggatgcttcagtagaagaacttctgaaaaaggatggaattgaagagctggatccggtgatcacatccaagaatacgtatgtggcgccatttgtaaatgcagaagaatgcgaataccttgtgatcgaagatgcgttcccgaacggaagaccagaactggaaaaaggcggtctgatgtttacagagcgtgagacagtagacaaagtggagaagatgaaagtctgcacctgcttaaatcctctgcatacagcgctggcagtattcggatgtctgcttggatatgaaaaaatctcggacgaaatgaaagatgaggaactcaaaaaattagtagagacgatcggatacaaagaaggtcttccggttgtagtcaatccgggagtactggatccgaaagagtttatcgatacggtacttcaggttcgtgtaccgaacccatttatgccggataccccacagcgtattgcaacagacacttcccagaaactggcgatccgttttggagagacgatcaaagcatatgcagcatccgatgaactggatgtcaaagacctgaagttgattccgcttgtatttgcgggatggctgcgttatctgatgggcgtagatgacagcggaaaagcatttgatttaagtccggatccgctgcttacaaccgtttgcccatatgttgcagacctgaagctggaagagggacaggatgtagaaagtgcagtatcagaagtactgaagatgaaacagattttcggtgtggatttatatgaagcaggacttgccgaacttgtatgtggatacttgaaagaaatgacaaaagcaccgggagctgttcgcgaaacactcaaaaaatacgtgtaggaggaagcagtatgaaagcatttatggatcaggatttccttctggagacggaaactgcgaagatgctgtatcatgattatgcagcgaagatgccggttttagattaccattgtcatatcagtccgcaggaaatcgcagaggacagacagtttgaaaatattacccaggtatggctgggaggtgaccattacaaatggcgtcagatgcgttctaatggaatcgaagagcgctatattacaggagatgcgtctgatcgggagaaattccagaaatgggcagagacactggagcgcgcgatcggaaacccgctgtatcactggagtcatctggagcttcagcgctattttggatatcatggcgcattaaatgcgaagacagcagaagaagtatggaatctttgcaatgaaaaactgcaaagcccgcagatgagtgcaagaaatctgatccgccagtccaatgtgacattgatctgtacaacagatgatccggcggatgacttaagatggcacaaacagttaaaagaggatgattcttttgaagtgcaggtactccctgcatggagaccggatctggcgatgaagattgaaaagccgggatttgccgcatacctgaaaaaactgggagaggcagccggtatggaaattcattcctttgcagagatgaagaatgccctgacaaagcgcatggaattctttgatgagatgggatgccgcgcatcggatcatggactggactatgcgatgtatgtgcctgcttcagaggaagagatcgaagcaatctttgcaaaagggatggaaggagagccgatcagcaaagaagaggaattaaaatataagactgcatttatgctttatgcaggaagagaataccatcgtctgggatgggcaatgcagcttcattacggatgtaaacgtgacaatgacgtaaaacgtttccgcaagcttggaccggatacgggatttgactgtattgatacttatacgccatctgcacagctggcagatctgctcaatgcactgaatgtgacagacgagctgccaaagacgattctgtacagtctgaatccaaacgacaatgcagccatcggaacgatcatcggatgtttccaggatgccggtgttgcgggaaagatccagcagggaagcgcgtggtggttcaatgaccacaagcagggcatgatcgatcagatgacgtcccttgcaaatctgggacttctcagtaattttgtgggaatgctgacagattccagaagctttttgtcttatacaagacatgagtatttcagacggatcctctgcaatctcatcggcggatgggtagaaaacggagagtatccggcagatgaagagatcctcggaagaattgtgcaggatatttcttacaacaacgcagtgagatattttggatttgatttgtaaataaaaggaaaatgaggaaagatcaatgctttcctcatttttttaagtttagagtcagatttaatttcccagttcattctggatccgctgtttggtatccaggatcagatgggtaaactgttccactctggcatcgtccatccggtctttcggtgcagatacgctaatggcatacgagggttttctgtgaagacctttcaatgagacggcgatacagcgcacacccagttcattttcttcgttgtccatggcatagccgtttttgcggacatctgcgatcagactttgaaatttgacgaaatcgacaacggtgtaatcggtgagctttcgaatttcgctgtgatcccagatttttttgactttttcatctttcatatcggccagcagagcttttccgaccccggaacagtataaagggatcgattttccgaccatggagactaaacgcacggaattgtgggaagcctctactttatcaatatatactgcattcagaccatccagttggaccaggtggaccgtttcattggtctgttctgcaagttctttaatgtaagggcggatcagatcgatgatattattctgggccagaatctggttggcgattccacagaatttaaatgtcagactgtatttcagtgtctccgcatcctgctttgcatattccatacagatcagggagtttaagatacggtggacggtacttttattgagatttaattccttgctcagttccagaagtccgatcggaccggtgcgggcaagacattctatggtatggaaaatacgttccgatacctggattgggtttttttcttccataaaattcactcctgtaaagtcagagctcaaaagagcgctgtatatcattcagtgcttattgtagcacggtttgggaagaagagtaaataagaaaataacaaagtaaaaaaatgtgaagaataccttgacaatcgagagaaactgagtataatcaaaattaaagagttcatattacgaaacgtagttccataatatgaaacaaacaacgtgattcagtgataaggagaatgaccatgaacgaagtattagaaaagattcagaaaatcgggattgttccggttgttgtattaaatgatgcgaaagacgcagcacctttggcaaaggcactctgtgacggcggacttccatgtgcagaagtgacattccgtacagaagcagcagaagagtctatccgcattatggcagagcagttcccacagatgctggtaggagcaggtacagttctgacaacagagcaggtagaccgtgcggttgcagcaggagcaaaatttatcgtgagcccgggcctgaacccgaaggttgtaaaatactgcatcgaaaaaggagttccggttacacctggaacagcaaatccaagtgatgtagagcaggcaattgaactgggactggaagttgtaaaattcttcccggcagaggcagcaggcggactgaacatgatcaagtctatggcagcaccttacacaaacatgaaattcatgcctacaggcggaatcaatgcaaagaatatcaacagctatcttgcatttcctaagatcctggcatgcggtggaagctggatggtaaaaggagatctggtagaggcaggagagttcgacaagattacagagctcacaagagaagcagtgatgacaatgctcggatttgaactgaagcacatcggaatcaactgtgaaaatgaagaagaggctgagaaaacagcaggaacattcgcgtctttatttggattcgagaagaagagcggaaacagctctgtatttgcaggaagcgctgtagaagcgatgaagagcccataccttggagcaaaaggacacattgcagtgggaacaaacagcgtagagcgtgcagtgaattatctggagtctcagggcgtagagttcaacatggaaagtgcaaaatacaaagatggaagaatgacagcaatctacttaaaagaagaagtcgctggatttgcagtacatcttgtgcagaaataaaagaatagttaaaggagaataacgatgagtaaaaaagtagttacatttggagaaattatgttaagacttgcaccagaaggatattatcgttttgtgcaggcagagacatttggagcaacatacggcggcggagaggcaaacgtggcagtttcactggcaaactatggatttgatgcttctttcgtaacaaaacttccggcacatgagatcggacaggcagcagtaaactccctgagaaaatacggtgtggatacatccaagatcgcacgcggcggagacagagtagggatctacttccttgagaaaggtgcttctcagagaccatccaaagtaatttatgaccgtgcaggttcttctatttatacagcatccaaagaagatttcaactggaaagaaatctttgaaggagcagagtggttccattttacaggaattacaccggcactcaacgacaatgtagcagagatctgtctggaagcttgtaaagcagccaaagagatgaatgtgaagatttcctgtgacttaaactacagaaataaactgtggagcaaagcaaaagcaggagaagtaatgggtgaactttgcaaatatgtggatgtatgtattgcaaacgaagaagatgcagcagatgtattcggtattcatgcagcaaacacagatgtaactgcaggagaagtaaatcacgaaggatataaagatgtagcaaaacagcttgctgaccgtttcggatttgagaaagttgcaattacacttcgtgaatctatttcagcaaatgacaataactggtctgctatgttatatgacggaacagactatttcttcagtaaaaaatataagatgcatatcgtagaccgtgtaggtggcggagatagcttcggcggcggattgatcgctgcaacactgagcggatatgattcacaggctaccattgaatttgcagtagcagcatcctgcctgaaacactccatcgaaggtgacttcaacatggtttctatggatgaagttgccaaactggcaggaggagatgcttccggacgtgtacagcgctaagcacttttggaagaatataaataaataagccataatcgactattttgttgccaatatacgccgggacagatttttctgtcccggtttttcagttttccttacagaagagattgacaatattctttttgtatagtactattatctcacaaaaccgaaacgtttcggttaaggaaaaggaggaaagagatatgccattagtaacgtcggaaaaaatgctttcagacgcacaaaaaggcgggtatgcagtgggagcattcaatgtagaaaatatggagatggcaaaagctgtgatcgcggcggcagaagagatgcgctcgccggttatgctgcagactactccatctacggtcaagtatggatctttggaaacatttgcagcaattgtaaaagcagaggcttctaagaccgatattccggtctgtcttcatctggatcacggcaacagctttgagctggctgtacaggcgatgaaagccggatatacttctgtgatgatcgatggatcccatgaaacatttgaagaaaatgtggcactgacaaaaaaagtggttgaggtagccagggcctatggagttccggtggaagcggagcttggaaaagtaggcgggaaagaagatgatctggaggcagaagcggatcataatacagatcctgaagaggcaaaagaatttgtggaaagaacgggtgtttcttctctggcgatcgcgatcggtacagctcatggattttatgcgggaactccagtgttggataaagaaagggtttcagattgtaaaaaggttgtttctgtaccactggtacttcacggtgcaagtggactcagcgaagaagatgtggtagaatgtgtacagcgcgggatgtgtaaagtgaattttgcgacagaattgcgtgtagcatacacagatgctgaaaaacagttgctgaaagagaatccggagacctttgatccgaaaaaactgggaattgcagcaatgaaagccgtaaaagaacagaccatactgcgaatgaagatgtgtggatgtacaggaaaggtacagtagttccacatagatgtagtaaggaaggcggaaagcatcaatgggagcgacgatgaaagacatcgcgagagtgacaggactgggactggcaacgatttcttcttatttaaatgggggaaatgtccgggagaaaaaccggatcaaaattgaggcggcaattgacgaattggatttcgaggtaaacgaggtagcgagaggtttaaagacaaaccggacaaagacgattgggatcatcattccggagctgaacaacattttctgtgcagagattattacagaagtggaagatgtgcttcgaaatcatggatatgcaacgatgatctgtgactgtagaacagatgcggcacgggaagcggaagcggtagagtttttgtttcgacgcagggtggacggactgatcttgatgccgtccggcaaatcaggaaagcatctggagagatttttacatgtgggaaaaccagttgtgctgatcgatcgtaatctggaagatgttccatgtgacagtgtacttgtggacaaccggggagctgcgcaggcggcagtagagagactttttctggcaggtcatcgaaagatcggaatgattgcaggaccggagcatgtatttacagcaagagagcgatatcttggatatgaagaggcgttcaaaaaggcaggaatcgaagtacaggattcattggttgtacatggagattatacgatcgcaggcggtgccagggcgatgaaggagcttgcaaaacagaatccgcagatgacagcagtttttgtatcaaattatgagatgacggttggagccatgatcgaaagcaatgagattggaatccggattccggaagatctgtcagtgataggatttgataatatcgagtttgcgaaagccagcaatccaaagctaagtattgtgacacagccgacaaaagaaatcggcagaaatgtagcagaactgatattggacagactggacaatccaacccgggagatgcctccgaaagaaatgaagttaaagaccagttttgtagaaggaaaatccgtacacatgttgtctgtatgacaaggtgtacgatttctttatcccgaaaaccgaaacgtttcggaatgttttggaggagaacatgaagacgtatttaataggaattgatattggaacaagcggatgtaaaatcgctgtatttaataaagcaggagaagtcctggccgcgcagagcggaacgtatccggtgtattatccaaagcccggatgggcagagcaaaatccggaggactggtggaatacaatctgccaggtacttccggaaatgttacaaaaagctgagatttcaccggatgagattgcgggaatcggaattgacgggcagagctggtcagccatcgcagtggatgaaaacggaaacgttctgacaaatacaccgatctggatggacacaagagcgcaggacatctgtgatgaattgaatgagaaaatcggaaaagatcggattttcaagctgtgtggaaactccctgcagccatcgtatacaacgcctaagattgtctggtatcagagaaatcttccggaagtatatgcaaaaacagcaaagatcttacagtcaaacagctatattgcatttaagctgactggaaaaatgacacaggatgtttctcagggctatggtttgcattgctttaatatgcaggaaatgacttgggattttgcaatgtgtgaggagctcggattttcaaaggatctgcttcctgaaatctatccatgccatgctgtgatcggaaccgtgacagaagaagcggccaaagaaagtggactttgcgtgggaatcccggttgtggcaggcggtctggatgcagcctgcgcagcactgggagtcggtgtacttcacgatggagagacacaggagcaaggcgggcaggcaggggggatgagtatctgcatggatcattattgtgcagacgagaggctgatcctcggagcccatgttgtgccgggacactggctgcttcaggggggaactacaggaggcggcggtgtcatgcgctggctggaaaaggaatttggagactgggaacgagaggaaggaaagcgaaggggcgtcagctctctggatctgatgaacgaagaggcaaaagtaattccggcgggtagtgacggagttgtatttcttccgtatatgtccggagaacgttctccgatctgggatccggatgcgaaaggtgtttactacggattggatttcagcaagaaaaaagggcatctgatccgggctgcgatggaaggaactgcctatgcactgaagcacaatctggaagcggcagaagaagcaggagcaaaagtggaagtgttaaaagcaatgggaggagcagcaaattcacacctctggacacagatcaaatccgatgtgaccggaaaaaccatggaagtcccctcatcagatactgcaaccacattgggagcggcacttcttgcaggagtcggagtaggaatgtatgaaagctttgaagaagcggtggagaagaccgtcaataaaggaagagtccatacgccgaatgtggagcataaggaaatccacgaaaagaattatgagacatacagagctctgtatgaacaattaaaaagtctgatgaaaaagacaggaggaaagaaacaatgaaagcagcagtagtttgtgcaaatgaagatgtacagtatctggattatgaagagccgattccgggaccgggagaagtgaaggttaaggttcgggcatccggaatctgcggttcggatattccgagagtgcttcacaatggagtacacttttatccgatcgtacttggacatgaattctccggagatgttgtggagatcggagaaggtgtcacaaaggtaaaagtcggagacagagtatccggtgcaccgttaaagccttgtatgaaatgtgatgactgccagaaaggaaacttttccctctgcaagcattatagctttatcggatccagagaacagggaagcaatgcagattatgtggtgattccggaacaaaatgcagttgtctatgattcttcgatctcctatgagcaggccgctatgttcgagccttctacagttgcccttcacggattgttacagaacgagtatcagggagggcagtatgttgctgtgttaggcggtggaacgatcggaatgttcaccatgcagtgggcaaagattttcggctccagaaaagttgtggtatttgacatcagcgaggagcgtctggaactggcaaaacgtctgggtgcagatgcagtcatcaatacaacgaaagaaaattatatgcaggaagcaatggcacttaccgggaaaaagggatatggctatgtgttcgagacggcaggacagatcccgactatgcatatggcatttgaacttgcgggcaataaagcaaatgtctgctttatcggaacaccacatgcagagcttacattcacaccggcaatgtgggagaatatgaaccggaaagagttccacctgaccggttcctggatgtcttacagtgcaccgtttccgggaaaagagtgggagctgaccgcacattattttgcaaccggacagttaaaattcgatccgggatttatctacaaaaaagttccgatgagtcaggcacaggaggcatttaagatgttcaagacgccgggactggtcaaaggaaaagtgttacttgtaaacgaatcgtaaatgagtggggagatagttgtaagatgatactgaccgtgacattaaacgcagcaattgataaacgctacgtggtagaaaaattctgtctgggggaagtgaaccgcgtgaaagagtgcgtatatactccgggcggaaaaggattgaacgtttcaaaacctgcggcgattgcaggagaagaggtaattgccaccggctttgtaggaggacatgcgggaaattatattgaggaggcgttaaagcctttcggaattcaaagtgagttttatcatctggacgaggagagtcgttcctgtatcaatatctgggatgagacgaatcgtgtgcagacagaatttctggaaccggggtttacagtaacagaagagcagtttcagggattcttaaagaaatttcgaaatctggtaaaacaggcagatgtgatagcaatgtccggaagtgtgccaaaaggactggatggaagcgcgtatcagcgtctggtggaaatctgcagagaggaaaagcggaatgtgattctggatacaagcggcgcattgcttaccatgggaattgaagcaaaaccgacaatgatcaaaccgaatctggatgagatccggatgttgacaggcacgtcctgtgacagcctggaggaaatgatcgaggcagcaaagcagattcatgaaggcggagtggagatcgtggcagtttcgcttggcgcagagggatcctttgtggtgtgtgaagaagggatttatcaggcgcaggttccgaaaatcgatgcagtcaataccgtgggatgcggggattccatgattgccggatttgcagtcggaatgagtcagaagatttccgtggaaggaagtttaagacttgcaagcgcgatttcagctgcagctgcacttcgagaagaaaccggattttttgtaaaagaagatatgaaacgcatttttaaagaggtaaaaataacaaagttaaaataaagaaagcgagggacaaaacatggcagaaatgattcagccggcaatggtgccgaaagtaaagttgtataccggagaagaaattccgtgtgtgggaatggggacatttggttctgaccgttttacaccggaacaggtatcaaatgcggtggcaggcgccatccgatgtggatatcgtatgtttgactgtgcggcatgttatggaaacgaagatcagatcggagaggtattccatgcggcattcgaagaaggtgtggtagaaagaaaagatttgttcattatgacaaaagtatggaatgatatgcatgaacgcgtggaagaatcctgtagaaagagtattcaggatctgcagtgtgattatattgatatgttctttattcactggccgtttccgaactatcacgcaccgggatgcgatgtggattccagaaatccagattcgaagccattttctgtggaagagtttatgaatacatacaagcagtgcgaagagctggtaaagaaagggttgatccgtcatatcggaatttccaatatgacaattccgaaaatggaggcagtactgccgctgatggagatcaagccggcagcttgtgaatcggaaatgcatgtctgcttccagcagcaggaaatttttgattatctgatggcccatgatattcagccgatcggatttatgcctcttggttctccacagagaccggagagagatatgtgtccggaagatgtagcagatctgcagacacctgagatgcaggaaattgcaaaggcacatggctgtcatccggcgctgatcgctttaaaatgggcacatcagagaggacagattccgattccgttctctgttcatgaagcagaatatgtaagtaacctgaaagcgatgacagaggatccgctgaccgaagaagaaatgcagaagatcgcaacactggagagaaacaaccgtcttgtgaaaggtcaggtatttttgtgggaaggcgcaaaagactggcacgatctctgggatgaagaaggaaaaattgtaacgttgtaaagatgtaaataagtagaaaggcatgctgtatggtatgtctttttacttatttaaggcagattgctattttaaacagaaaaaaattcggttaaaatagaagtacatatgaaaaaggagattaactatgtacattttatataatagactcatcactgcattgaatgagaaaaaaccggattctacagaattttatattgccaaaatgatgatctggaatttatgggagcttccaagaatgtcgatcagtgatgtggcaaagatgtgtgctgtttcaaagtcaacgatttccaagtttgtcagagacattggttttgaagattatttagattttaaactggaagcagtacggcaggggaagaaggaaatttataatagcaatggaaaatgtaatatcacagattatattcgggggcatggcatatgggaatatgaaaaaattttgtcagaagatattagatctgtattgtttggaatagaggaagatcagttaaaacgtctggcggtggatttgcatgaatacaaacacctggcagcgtttggaatcagttattcagaatctgcggcgatcaatttgcagcataaaatgcattattaccataagtttttgtatacgacaatgaatgacagacagcaggaaaactatatcgaatcagcggatgaggagacattgatctttattttttcgaattcaggaaaatacatcactgaatatcagaatcgggaagggcggccgccaaagtatagttttgataagacgaaagccaaaatcgtgctggttacatcgaatgaacaaatgttggttgataaaagagtagatgagtgtgtgttgtttcgatatgcagactgtgtccaaaatcatccaatcctgtatcaggtgttcatagaacgactattatacagttatgaagagttatatggggcttcagaaggtatgaatacaaaataaaagaggttaaaaacagagggttttaaagtttccaaaattcgaacttttaaaaatctctgttttttttattataatgatagtaacaaatagagctttatttgagaagaaaaaggaggagtctatgggaaatatttatttccgaaaagaggcggaagaatggaaccaggcgtttccagttgggaatggatttcttggagcaatggtgttcggaaatgttgcaaaagagaggatacaggtgaatgaggattccgtatggtcaggcggattttcaaatcgggttaatcctgatgcaggacgatatcttgaaaaaatcagagaatgtttattcgaaggaaacgttcaggaagcagagaagctggcagaacaaagtatgtatgctacaagtcctaatatgcgggtgtaccagccgttaggagatatctggattcgttttatggatcaggaagcagagcgaaaactggctcgggatgaaagtggactgccatatttaaaagaatcagcagcagaagtggaagcatatcagagaatattgaatttagaacaggcagttggaaagattgaatactgtgtgggaagaacaaaatggaatcgtgaattttttgcctcaaatccggcaaaagtggctatgtacagtatttgtgcagaaagtggagaggacattaaccttgagatatctgcaaccagaaaagacaatcgatcaggtcgcggagtatccttctgtgatcggattctggcagaggaaaatcagtacatctggctggaaggatcatccggaggaaggaaaggaattggatttgccatgggagttcgagtttgttcctgtgggggaaggcaatatcagatgggaagccgtattattgtagaaaaggcaagaaaagttctggtctgttttacgggaagaacgacatttcgatctgcagaaccgaaacaatggtgcagagagcatctggcttcattatctctggacacgtatgcagagagaaaaagagagcatattcaggattatcaaacatactttaatgccagtcgtctcacgttcagacaggaaatgaatctggataatctcacaacaccagaaagattaaaaagaatccgggaaggacatcatgatatcgggctggtgaatctgtattatgattttgcaagatatctattgatcagttccagcagagagggtagccttccggcaaatttgcagggaatctggaatgaagaatttgaacccatgtggggaagcaaatatactataaacatcaatattcagatgaattactggatggcggaaaaaacaggattgcaggcattacaccttccgcttctggagcatttgaagcgtatgcatccaaggggaaaagaggtggcggcatccatgtatcatgcagagggattttgctgtcatcacaatactgacatatggggagattgtgcaccacaggattatcataccagctctacgatatggccgatgggcggagcctggctgtgtctgcatatatatgaacattatcagtatacaaaagataagggatttttggaggaatattttccgattttaaaagacagtgtacagttttttatgaattatatggttcagaattcagatggaaagtgggtgacaggaccatctagttctccggaaaatatttacatcacggctaagaatcagtatggatgtctttgtatgggaccaaccatggatattgaaattgtaagagaattattcagtaattatctgaaaacggtagagattttggaaaaagaggaaccattaacagggctggtaaaagaccggatagaaaatctgccgaaattaaaagttggaaaatatggtcagattcaggagtgggatcaggattacgaagaattggaagtgggacaccgtcatatttcacagttgtttgctttgtatcctgcacagcagatccggaaagaccagactccgaagctggcacaagcagcagaaaaaacattggatcgacgtctggaaaatggcggaggtcatacaggatggagtaaagcgtggattatcctgttttttgcaagactgtggaagaaggaaaaagcatatcaaaatcttcaagaattattggcagaggcaactttagacaatcttttggataaccatccaccgtttcagattgatggaaattttggaggagcctgtgggatattggaaatgatcgtacaggactaccaggatgttgtttatcttttacctgctttgccgcaggagatgccggatggaaatgttagtggaatccgaacaaaaagtggctttattctaaacatggagtggagcggatgccgtgtaaaaagcgtagaagtagaatctgttcatggaacgcagattacaattgtaaatgaaacattagaatcaagaaaaatcagatgtgaaaaaggcgaaaagaaagtgattgtattcgaatgaaaagagagggatcgagatgaaatatgaaaaaatggtcagagagattgtagaggcaatcggtgggaaagaaaatattctcaatgtatatcattgtgcaacaaggcttcggtttcagttgaagcaggaggacacaattcaagacgaaacagtaaaaaacatagaaggtgtgctttccgtcgtaaaaggcgggggtcagtatcagattgtgattggacgtcatgtgggtgatgtatatcaggaattactatctgtgtatgatatgcagaaagaagaaagcggattaaaagatgcaaaagaatttaaagaggaaatgaaagataagaaaatctcaagccggtttatcgatacgatttcaggagtctttactccgattttaaatctgttgatcgcaactggaattattaaatgtttcctggcacttatgactgcgaccggtttgatggatgcaacggcaggaacctatcagatcctttccattgcaggggattgctttttctactttatgcccgtctttttaggatatacggcaatgaaaaaattcggtgggactccgtttgttggaatggctatcggtgcagctcttgtgtacccgtctattgcggtcattatgggaggtgagccactgtataccctttttgcaggaacgatttttgagtcaccggtatatgttacatttttggggattccagtgattctgatgagttatgcaagctctgtgattccggttgtattagtctgcttttttgcggcaaagctggaacgatttttggatcgttgtattccacagttggtgaaggcatttgtcgtaccaatgcttacaattttgggcggtgttgttctgggacttctggtattgggaccgattgcaacattcgcaagtaatttgttgggagctctgatgggatttctctttgaaattaactctacaatctgtggatttctttatggagcattgattcaggtatgtgtgatgtttggggtgcactggggatttgttgcactgaacgtcaataatatggcaactctcggatatgacgcgattacgatcgcaggacttgcttctgcgtttgcacaggcaggggtggttctgatgatcatgctcaaaacaaaaaataaaaaattaaaaggagtatgtggccctgcgattatttcggcaatgtttggaattacagagcctgcaatttatggggtaactttgcagtttaagcgtccgtttatccttgcttgtctggcttccggtattgggggtgcgattatcggatttggaggagtaaaacagtactcagcaggaaccaatggaatttttggatggttacaagtcatcaacccacagacaggatttgattccacagtagttgcagcaattattgcatgtatagcaagttttgtatcagcagtagtacttatgaaaatatttgataaaaaactgggaatcgatcatatttagcgtttctttcaggcatggaaagagtcggtgcagatatatctggcatcgactttttctatgtataaaagaaaatctccgccgaaatttctactttcacaatacagtgctttgttgtatactaggcgtaggaatttctgtgtttttgacaggagtcataggtgggaggatacaaaagtgtataaagtgttattggtcgatgatgaaatcctcgtccgtgaagcaatcagcgcgaagatagaatggggacatcttgggtttgaactggtaggtgattgcgaaaatggaaaagcagcgattgaatttttaaaggaaaatcctgtggatgtggtgttgacggatatttgtatgccatatctggacggaatggggcttagtaaatatatttatgaaaatatgccgcagacaagaatcattattttcagcggttacagtgattttgaatatgcaaagcaggcaattcagtataaagtcgcagagtacttgctgaagcctgtgacggcaaaggagctgacagaggtactgaccaggatcagggaaaaactggacagtgagagaacggaggaggagcggatcgatgcgcttcaaaaagcatatcggacctatacaaagaatgaggcattgattatttccaaaaccttgtccaggctgctgcagggaacgcaggcgattgagacgagtatggaagaattaaaagaattcggaattgaactgggaggtgcgttttaccgtgttgtgacgacagatatcgatgtgtattccagtttgtatgatacgaatgatgaactgaaaaaagagagtgcactcatgtcttttgtggtggaaaatatcagcaatgagatcgtcagtgattacaatgcaggaattgcctatcgggattcggacagcagagtctgtatgctgttatggagcgataacccaaaagaattttcgcaggagattcaagtgatctgcagagagattcaaaagacagtgaaggaggccatgcagttgagcgtttctatcggaatcggattctgtgtggaaaagctggaagaactgccgaaatcctatgagtctgcagtggcgaccttaaaataccggtatacaaaaggaagcggacaggtatatgactgtgaatctccgatgagctgcggaaatcttctggagctggaacaggactttaaagatattgaggaggcagcgaagaaccagcagagtgaagagcttatggatattctggatcatgtggaaaaatggatcagtcatggatatgtgacaagaaaccaggctgtatcatggctccggcagatcatgatgatcatttacggcgtggtgcgcagagccaatgaagattttcagatggatgagcgtgatatcggagatgtgatggagtccagaagctttaccaatgccatggaaaaggtgagagcgtatgttaagcgtgccatggaagcaatggagatggcagggcagtccagcggagagcgctgggcaagacttgcacttgaatatcttaagaaaaattacggcaatccgtctttgagcttgaatgatgtatgcgaacatctgaacattagcacaagccgtttcagcagtgtattcaaagaagcgacgggaaagacatttacagaagctttaaatggaatcaggatggatcgggcaaagcagctgttacgtgagaccagcctgaaaaattatgagatcgcagaaaaagtaggatttagtgatccgcactatttcagcattgcatttaaaaagagcacgggactgactccaaaagagtattccagggagaagtaagtgatgaaaaagcgtgagatgacgatatttggaagatttaagagtatacgggacgcgatgatgctctctttttctgtgttggtggtagttgcggttctgatctttcttctgattgctatgaatttcacaaaaaaaacaatatacgagaattccagaacttcgacttctcagctgatcagtcaggtgaattatgatatagattcctatatagactatatggaaaatatttcctgggtggcggcaagtggaagtgatctgtcgcgttatttatttaatcaggagcagatgcctgaggaaaaggaggctgcgaaagagcggatcctgacgcagtttactacgattctggaaagccgttctgatatttacaatgttgcggctgttgcagataacggagaagctttgatcaattcaggagcggatcgtctcaataagtatgtggatgtccggcagcagagctggtatcaggcggcgatccattcaccgaccgggatcgcggtgtcatcttctcatgtgcagaatgcgatcgcaggcagctatcactgggtgatcaccttaagccgtgcgattgtgaatgagcagacaggagaacgcgagggggtattttttgtcgacttaaattacagtgcgatcagcagtctttgcagcaatacatccattggaagcaagggatatatttttattctggatgaaaaaggcagtatgatctaccatccgcagcagcagctgatctatggtggattaaaagaagaacggatcgaggatatcctggcttcaaaaggggattttctggagacagaggaaggtgaagacagtaagctttatacgatgtcaaaatctgagaagacgggatggacagtggtaggggcatcttatgtgacggaattgatgaaaaacaatcggcaggcacagatgttgtatcttctggcagcagcagggattctgatcggtgtcattctgatttccagcttcatttccagcgagatcaccaaaccattgagacgcttaagagattcgatgagtctggtggaaaagggggattttgaacaggccagtgtggaaatcacggcagaaaatgagattggaagtcttagcaaatcgttcaatgccatgacgcaaaagatccatgcattgatggaacagaacatctatgagcagaagcagaaacgaaagagcgagatgaaagccctgcaggcgcagattaatccacactttctttataatacactggattctatcatctggatgtcagaggcaggagaaaatgatcaggtcgtattgatgacatctgctctggcaaagctgctcagacagagtatcagcaacgacagagagcagatcacggtggcagaagaaatcgattatgtgcgaagctatctgacgatccagaagatgcgttataaagataagctggagtatacgattgacgtggaagagcggatcctggatgttcggatcattaagtttgtacttcagccattggtggaaaacgcaatctatcatggtctgaaatataaagagaccaaaggaaatctggatattcgcggttacagaagaggcaatcgtgtctgtctggtcgttgcagatgacggggccggaatggaagagtcggaattggaacatattctggagaaaaaagagaaaaagaccaagtcaaatggggtaggggtatataatgtgcagaaacggctgcagctctattacgggccggaatatgggatttcttatatcagcagaaaaggtgagggaacggttgcgaccgtgacgatccctctggatggaggaaaaagcaatgaagagacgggcaggtaaaagactgattggggtaatgacggccggatttgtgcttttgatcctgattctgatcacgatcggtgtgcttcaggacagctctcaaaataagcggacttataagatcatcatggttcctaagaccattgatgaatccaatgatttctggaccgggctgatcgaaggagcaaagctgggagcagaagaatttggctgtgagatcgagatggtcggaagtgattcagaggatgattatgaagggcagaaccggctgattgaagagagtatcaagaagaatccggatgcgtttctgattgcgccatgcagttatactcatacgacagaagcagtgcaggaggcgatcaatgccggtatcaaagtaatcctggtggactctgtgatcgacaaagaaattgccaacggagtggttgcgaccgacaattttaaagcagggaaagaactgggaacgtttgcaaaaacaattttaaaaccggattcaaagatcggagttgtggcgcacgtaaaaggaagctccacagcgacagaaagagaggatgggatcagagaaggtctgggagaggatcaaaatcggattcaggatattgtctactgtaattcttcttacgatcttgcaagcgatctgacagaaaaaatgttaaaagaacggccggagattgatgttgtgattggaacgaatgaatattcagcagtcggcgctgcccgcggcgtcaaaaaaatggggatggaagatcaggtgaaggttgttggatttgacaactccgtggagcagatccagcttttggaagccggagtctttcaggggatcgtgatccagaaaccatttaatatcggatatctgggggtggaacaggcagtaaaagcaattgaaggctatccgatggaatataatctggattccggctgtaagctgatcaccaaagagaatatgtatgaagaggaaaatcaaagacttttatacccgttttccggtcaacagtaagcgaaaaaggtgaaaaggttacactaccgtgtgaaatattacccggtggtgtaattttttaaccttttttaggaagattttcaatttcaatcaggaaaaagaaagactatactatatataaatcttagttctgaagtcacgggttcgaaagttgatctcgattctgacactacgaaaagtatgaaatctggggttcatgttttccaagtattgcagcgggcgcctgaaggagtcgaagcagacacggggcggtggcgcagaacagcgagataggaaatgattccgtatttagaacagacggaacaaaagaagtaggaggacgaaaagtggaaaagattaaacaaaatccttttgtaaaaaaggtagggtttaacagaatcgtgttatgctttgtattacttctgatgtatgctttcttctgcgcactgacacagggaagtttcttcgggattgaacgtattctgaacaccctcaattatgtatattttctggggttcttatcattgggagttacctttgtaatcgcaacaggaggaattgatttctccatcggaccggttatgttctgttgtgcattgatttcaggttactgcttcacatcgcatggaatgccgatgccggtagcgctgatcctcagcattgtgatcggactgatcttcggtatctttaacgggtatctggtagcatactggtcagtaccttcattcattacttctatggcaagtatgaatatttcaaaaggtgttgcatctgtattcacaaagacacagtcagtcagctggcctcaggagatgcaggaaggcggatggtttagaaatatcatcagcttcaacggaattccggtaggtctgatcattttcctcgcagtggcagttgtctgtgcgatcctgttaaataaaacaaaacttggacgttacatcttatgtcttggaagcaacaaagaagcagtaagactttccggtgtaaatgtaaaaaaatgggaaatgtctgcatatattatctgtggaatcctggttggtatttcagcaatcttcttcacagcagcttatacaactgttcagcctggatatggtgatcagtacaacaatgaggcaattgcaggatgtgtaatgggtggtacatccatggcaggtggacttgcttctatcagcggtacagtaatcggtgtattcatcatcgcattgcttcaggaaggtattcttgctcttggctttacaaaagattatcagcttatcatcacaggtcttatcgttatcgtcgcagtattcagtgacgttgttgcaagacgcagaaagaactaatcgtgatacataataattgagagaagaagtgaaatagaaaggcaagggtaataaaatgggtgaagttatattaacgatgaaaggaatcgacaagtctttccctggtgttcatgcactggatcacgtagatctggaagtcagaaaaggtgaagtccttgctctgatgggagagaacggtgccggaaagtcaaccttgatgaaggtccttacaggtatttataaaaaagattccggaactattacatatgaaggaaaagaagtagagtttgcaaatacaagagaggctcaggacagtggtatcgtcatcgtacaccaggagctgaacatgcttggtcatcttacagtggcacagaacatcttcatcggaagagagttcaaaaaaggtgttcgcatcgatgataagaagatgaatgaagaagcaaaaaaactgtttgacagaatgcatatcgacattgatccaagagagacaatgaatcatctgacagttggtaaacagcagatgtgtgagattgcaaaagcaatttctcatgatgcgaaagtcattatctttgacgagccttctgcagcgttgacagagacagagattcaggaaatgtttaagatcatcaatgacttgaaggcaaaaggaatcggtattatttatatttctcaccgtatggatgaaatcaaggttatcacagaccgtgtaacagttatgcgtgatggtacttatgtaggaacattgatcacaaaagactgtacaaaagatgatatcatcaacatgatggttggacgtgttatttatgaagatccaaagacacagaatatggtaccaaaggatgctccggttgtattaaaagtcgatcatctgaatgctggaaagatggtaaaagatgtcagcttcgaactgcataaaggtgaaatcctcggattctccggactgatgggtgcaggacgtacagaaactgcccgcgcactgtttggagcagatccgattgacagtggtgacatttatatcaatggtaaaaaagttgatattaagagtccggaagatgcggttagaaacggtattggatatctttcagaagatagaaagagatacggaattgttgtacagaaatctgttgcagaaaacacttctatggcaactatggaacagtttatgaagggaatcttcatcgacaagaagaaagaaaaagaagtggctcagcagtacgtagattcactggctacaaaaacaccaaacgtagatcagttggttgtgaatctgtcaggtggtaaccagcagaaagtcgttattgcaaaatggctgacaagagactgtgatatcctgattttcgatgagcctaccagaggtatcgacgttggagcgaaaaacgaaatctataaactgatgaatcagctggcagagcagggcaaagccattattatgatttcctctgaaatgactgagatcttacgtatgagtgatagaatcgtcgtaatgtgtgaaggaaagaaaactggtgagctggatatttccgaggctacacaggaaaatatcatgaacatggctacacgagagatagagtaggaggaagtaaaaatggcaaataagacaacaaagacggctggcacaaacaagtcgttcattgacagaatgggaggacagaaatttatcgttttcctgatcgtgatcgcaatgttcatcttcttttgtgcaatgagtccgggatttagaaaatatacaacgtttgtaagtattctggattattcttactacattgcgttgatggcaatcggagttgcattcccgctgatgacaggtggtgtagacctttccatcggtacaggactgatctgttattcgctggtaggcggatacctgatcgtacatcagggatggccgaccgcagcaggtatgctggtaagtattttaatgggtgttgcaatcggagttctcaacggagttttaatcgcgatcatggatcttccggctttcctggcaaccttatgtacatcgatgatcgccagaggtattggagcaatcgtagtaggtggatttggtattccttggccggtagcaggatcaccggaaggatggttcagaaacatctttaagattaaaacagatggtatgaacattccaatcggatttttatggatcatcttacttgtaatccttatgacattcgtattgaaccatacaaaaatcggacgttacacactggcaatcggaagtaacaaagaagcaacaagactctcaggagttaatgttaaattttaccacatcatggcatatgtgatctgtggattctttgcagggctggcagcaatttcctattctgcgatctttgcaacagttcagccaggtagtggagcaggatttgagctggaggcgatcggtggagcgatcatcggtggcgtatccatgacaggtggtgtgggaagcatcactggtacacttgcaggtgtattcgtaatctgtctgttaaagacaggacttccattcatcggactgacagcaaactggcagcagatcatcacaggtctggtattgatcgcagctgtattgatcgatatcttcaagagaaagaaggaagcagcttaatttgtgtcagattgaaaagatagatagcagaccggcgtcgggaatctggggattcccccggctgttactatagaaaagaggaggctgcacctcggcttgcagtcagaaaacatatcttaggaggataagaactatgaaaaagaaagttttagcagtgttacttggcggatgtatggtagcaggattgttagcaggatgtggcggcggaggagacgacgctaagacatctgatgatggaagcaaggattccggaaagagcggcggatataacttcgaagttgttgtaaagagcttccagtctacatactggcaggcagcgaaacagggtatcgatacagcagcaaaagagcttaatgtaaaatgtaatacaacaggaccaaacgctgagtctgatattgctgatcaggtaacaatgttgaacaacgcaattaacaaagctccagacggaatcgcactggcagcttgtgaccagagttctgttatcaaatctctgcagacagcactggataagaaaatccctgtagtttgcttcgatacaggtgtagcagatgctccggaaggatctgtatatgcaacagttgttactaacaacgaagaagctggtggaatcgcagcagaaaaaatgtatgaagcactgaaagatcagattgcagatgcaaaagatactgtacgaatcggtgaagttaaccaggatgctacatctggaaacattacaggacgtggtatgggattcatcaacaaattcaaagaacttgctgaagctgacggaaagaaagttgcagtagttggaaatgaatactatgtaaaccttgttgagaacaacgcaaaagaagctgatgctgatatcatcatcgaagtagctgtacctgcacagacaacagtagaactgtctgctacagaagcttctaacatcatgaacaaaaaagatacaatcgcaatgttcggttctaaccaggtaacagcagaaggtcttctgacagcaaaccagaacctggatgtacttggatcaggagatggaaagatccttggtgtaggatttgatgctggttcaacacagaaagcagctgtaaaagacggaacattacttggatctgtaacacaggctccagtagatcagggaagaatcgctattgagactctgaatgacatctgcgaaggaaaagaagtaaaagacgtagagacagcttgttactggtacgatgcagaaacaatggaagatgcagaaatcgcaccaaacctttacgactaatcttttgctgatcaaacagtaaaaagtgatatctaaggagaaaccgggggttttcccggtttctttttatgaaagacaaacactcaggaggaacacacatatgctcaatggaatagaaactatttttgataatacaacccaaatgcttcggcatttaaagaaaaaatcatttgaaaaaaatacacaggattttatcgattcctacggacattatttccgggaaatgacagaatatgtggacagtatttccgataaagagcgggcagcagaagaaattgcagatacactgataaatcgtgtagagaagaagtttgcttcgaaaaaaggaaaaattgattccagaacacaggtagatctgaatttttttatgatctattacgtttttcctacaattttggggactgagcacgagtatgcgaagctgatcgctgacagcatctgcagtgcatggggaaaacggtttaaagagagtcagattcagtatacagattatgatacattgtacggatcattcagggaaaagatttttggtattttttaaaaagagtttcgccagagcagcatggtgaacgtcgagttattctgagggtttcaattcaggtatgtaaaataagagtgttttcagacgattatggggattccccgcaggtaggtgagagaggcttattctgcggggaactttttgtaatataagaaagtggtatatttttatattttaagatattttttgggcgtggttcctttgtattttttgaatgttttgatgaaataactcagatcattgaatccggaggcgtaggcaatttctgtgatcgacagatccgttgtgatcaactggtaacaggcgcgttcaatacgataataattgaggtaatcaatcggtgtccgatgcgtcatctcgtgaaaaaagcggcagaaatatttgggtgacatatttacacttccggagatttcttccaatgtaagaggaagattataggaagattccataaattccaatgcctgcttcagctgcaaaatccttttgtggcttcggtgttcctcatccggtgcgtttttacagaaaccttcactgaagagagtgccgaaaaattgatacatggcgccgaaaactacaagctgatacccctcttttttggaggctgccgcatcaaaaagtgtccagagtgtgcggtggatcgtattgcagattttcggatagtgcgtctggacggaaacctcatgatctgtgatctggcgaagaagacgacagcaggaatccgtcttgttcatcagcatattcatatcgaacaccagacattcgtatacgcaatcatcgggaataccggaatggatcgaaccggctgggatgaaaatactgtctcctgcttctgcaagaaattcaatttcatcaatggtaacagtcagagatccacttaggatgcggatcagctcaaattctacatgccagtgaaaggacatgacatactgcggatgggaagcagtgacgtgataatattccagaggaaagtcagcagttcctcttcttctgttttctctgtagttgatatattgcataagatactcctgggtgaatattgttatattttttactattatagcacaagtaaaaagaagcacacaatgctaaaataaaatcagtaatggttaagaacctttgaaaggaggcatatcagtgagcgataagaaaaagcaagttctggcgtttgatttcggaggcggaagcggacgtgcgatcctgggaactctggaaaacgggaaaatccatatggaagaagttcatcgtttttccaatgatccggtaatcgtaaacggaaccatgtattgggacacactgagacatttttttgagattaaacaaggcattgtaaaagcaaaacaaaaaggcggctttgagagtatcggaattgacacatggggcgttgatttcggacttttggacgagcatggcgatctgcttgagagtgccgtacattatagagatgacagaactcttggaatgcaggaggaagtttttaaagttattccaaaggaggaagtctacaatttaacaggaaatcagtttgaaaactttaatactattttccagttgtactctctggttcagaagagaccatggattctggaaaaagcagatacgctgcttttgacaccggatttatttaattatttcctgaccggtgaaaagaaggcagagtataccatggcaacgaccacacagctgatggatgcaaagaacaaagtctggtctgaccggattttagaggcacttcagattccgaagaagattcttccagagatcgttccgagcggtacagtcgtaggtacacttcagccatcaatctgtgaagaacttggtgtagagcctgcgaaagtcattgcaatcacaggacatgatacacagagtgcggttgtttctgttccgacgcaggagaaagatttcatctttatcagctgcggaacatggagtcttttcggtacagaactcgacggaccgatcatcggtgagaagtcactggagtgcaacgtcagcaacgaaggcggatatggcaatacaacgacattgttgaagaatattatcggactgtggcttgctcaggagagcagaagacagtggattcgtgaagggcaggaatattcattcggagagctggagcagatggcacagaaagcagaaccgttccagagctttatcgatccggatgcaccggagttcgttccggcaggaaatgtaccggagcgtatccgtgagttctgccgcagaaccggtcagaaagtaccggagacgattggtgagatcatgtgctgtatcaaccagagtctggctctgaaatacagatatgcactggagcagattgaaagctgcacagacaaacattattccgtgatcaatatgatcggaggaggaatccagagcaaactgctttgtcagatgacagccggagcaagcggacgtaaagtcattgcaggaccggtagaggcaacagctcttggaaacattgctgttcagctgatgtcacttggagaaatcaaagatgtggcagaggcaagacagatcattgcaaattcagaaactacatatgagtatctcccgcaggatgcggaaaaatgggatgctgcatatgaaaaatttaaaacatttattcaataattttcaaggaggaatgtcattatggcagaatcaagattaatcggaggatatcctgtaattggtatcagaccaacaatcgacggaagaagaggagcattaaaagttcgtgaatctctggaagatcagacaatgggaatggcaaaagctgcaaaaaaattgtttgaagagaatttaagatattccaatggagaaccagtaaaagtagtaatcgctgacacaacaatcggacgtgttgcagaatctgcagcatgtgctgaaaaattcaaaaaagaaggtgttgacattacactgacagtgacaccatgctggtgctacggatcagagacaatggatatggatcctatgacgatcaaaggtgtatggggactgaatgcaacagagagaccgggagctgtatatctggcatctgttctggctacacatgcacaaaaaggtcttcctgcatttggaatttacggacatgacgttgtagatgcagatgattctgaaatcggagaggacattaaagaaaaactgttaagattcggacgcgcagcagttgcagcggcatccatgagaggaaaatcttacctccagatcggatctatctgtatgggaatcggtggatctatcattgattctgatttcattgagtcataccttggtatgagagttgagtctgtagatgaggtggaaatcattcgtcgtatgacagagggaatttacgatgaagcagaattccagaaagctcttgcatgggcaaaagaaaaatgtacaatcggatttgataaaaaccctgacgaactgaagatgagcgaagagaagaaagcagaacagtttgagttcgttgtaaaaatggcagttatcatcaaagatttgatgaatggaaacaaaaaccttccagaaggatgcgaagaagaagctgttggacacaatgcaatcgcagctggattccagggacagagacagtggacagacttctatccaaacggagactttgcagaagcaatcctgaacagttctttcgattggaatggagcaagagagccatacattctggcaacagagaacgacgtattaaacggacttggaatgttgttcatgaagcttttgacaaacaaagctcagatttttgctgatgttcgtacatactggagcggagacgctgtgaagagagtaacaggatatgaaatcgaaggaaaagcaaaagaagcagatggtttcattcacctgattaactcaggagctgcatgtctggatgcaaacggagaatccaaagatgcagacggaaacaatgtaatgaaagcctggtatgatgtaacagaagaagatcaggatgcaatgcttaaagcgacaacatggaacgcagctgacaacggatacttccgtggaggcggattctcttctcgtttcctgacacaggctgagatgccggcaactatgatccgtctgaaccttgtaaaaggacttggaccggttcttcagatcgcagaaggatggactctgaaccttccagacgaagtttctgacaaactttggaagagaacagactacacatggccatgtacatggtttgcaccaagatgtacaggaaaaggtgcattcaagacagcttacgatgtaatgaataactggggagctaaccacggtgcaatttcttacggacatgtcggtgctgatctgatcacaatggcatctatgctgagaatcccggtttgcatgcacaatgtaccggaagaagatatcttcagaccagcagcttggaacgcatttggtatggacaaagaaggtgctgactacagagcttgtgcagcatacggtccgttatacaaataagaaaataataaggagtaccttcgggtgctccttctataaaattgcagaatgtttgtggaggaaatcaagatgttaaaaggaattccaaaaattttatcaccagaattattaaaagttttatgtgaaatgggacatagtgaccgcattgtgattgcagacggaaactttccatcagaatctatgggaaaagatgcgattgtgatccgttgtgacggacatggtgtaccggagatcctggatgcgatccttcaggtattcccactggatacgtacgtagaaaatccggtaaacctgatgcagctgatgccggatgatgtgggcaaagtagagacaccgatctgggatacatacaaagagatcgtgaaaaaacacgatgaccgcggagaggctgcaatcggaaatattgaaagatttgcattctatgatgaagcaaaaacagcatatgcgatcattgcaacaggagaatctgcaatttacgcaaatgtaatgctgcagaagggtgttgtagtagagtagaaattataattgtacggattcgggcaatatagatttctggatatgatgactggggaaggttctgtaaaaagcggaacacttcctcagttttttgtttatgcatgtctttttgtcagtggacatagactataagagaaagtaaaatatactggtgaaacaaaaaaatctatctttataataggaagatgtttgaatggatatgtatgaggtgtaaaggtttatgaatctggaagaaatctggaaatggctgaaaggaaaacggaatacattttttgcggaggcggcaactgcctttattttaattgctgttctgggtgttgcaggaattacggcgggaagatctggtattacaaagtcttcagaagtggagtccgtacggacaaaggcagaagcaaacaaagtggaggagcaagagcaggagaacgcggaaaagaagcaggagacgcagacggaggaagtgattgccgacgggcagtacccaatcatgggacaaagcagtgtgactacagagcagatggtttcttattttcagtccagtggaaaagcatatccggcggaaagcctggctaagggcggagcggacagtatcgaaacattttgcaggatttatgtagaggaagcgcaggcagagggtgtgagaccggaggtcgcatttgtacagactatgaaagagaccggatttctccagtatggaggggatgcttcgatcgaacagtttaattttgcgggacttgggacaacaggcggtggtgtgccgggcaattcttaccccgatgtgcgaaccggggtgcgggctcagatccagcatttgaaggcctatgcgacagcagatcctctggcacaggaatgtgtggatgaccggtatgaatatgtgcagaaaggctcggctccgtatgtgcagtggcttggtcagaaggaaaacccgcaaggggcgggatgggcgaccgcagaaaattacggatattcgatcgtggagatgatctctcatctaaaaggtaaaaattcgtaaaagcgggcaggatacaaaaactgtgtaaattctatgaaatatcttaagatttttgaaattccttgacaaatggaatatcgaaagatatgattatctggtagttaatatacagttaacaattagttaaaataaaaggttatgagggagaggagtacacaattactcttggcagagagaatcgtccggggctgaaaggcgatttcaagaaagggctgtggaaggtagcttctgaaccggatatctgaacaggaagtagggtatcccggagttgttcacgttacaggactcaagaagatatatgcgtacgcatataatgaaggtggtaccgcggaacattcgccctttgcatttctgatgtggagggtgtttttttgttattgagagaatgacgagcgggaaggaacagaacagggacattttgaggaggaaattatgagtaaagaactggcaaagacctatgatccaaaagcgatcgaggaaaaattgtatgaaagatggtgtgagaacaagtattttcatgcggaggtggacagaagcagaaaaccgttcacaacggtgatgcctcctccgaatattacaggaaagctgcatatgggacatgcgctggacaatacattgcaggatattctgattcgctataagagaatgcagggatacaatgcactctggattccgggaactgatcatgcggcaatctccacagaggtgaaggttaccaatcagctgaaggaagaaggaattgataagaaagaactgggaagagaaggattccttgagagaacctggcagtggaaagaagagtatgcgggaacgattgaaaatcagctgaagaagctgggaatttcctgtgactgggacagagagcgttttacaatggatgagggatgttccaaggcagtagaagaagtatttattaaattatacgaaaaagggtatatttacaaaggttccagaatcatcaactggtgtccgaaatgtaagacctctctttctgatgcagaggtagagcatgaggagcaggcaggcaacttctggcacatcaaatatccgatcgtaggaacagatcgttttctggagatcgcaacaacacgtccggagacaatgctgggagatacagccattgccgtacacccggacgatgagagatacaaagatatcgtaggcaagaatgtattgcttccgctggtgaataaagagattccggtcgtggcggattactatgtagataaagagtttggaaccggtgcagtaaagatcacaccggctcatgatccgaatgacttcgaggttggaaagcgtcacaatctggaagagatcaacattatgaatgatgatgcgaccatcaacgaaaaaggcggaaaatatgcaggaatggatcgctacgaagcgagaaaagccattgttgaagatttaaaagagcagggatatctggtagaaatcgagccgcactctcataatgtaggaactcacgaccgctgcggaacgacagtagagccgttgatcaaacagcagtggtttgtaaagatggaagagctggcgaaacctgcaatcgaggcacttaagacgggagaactgaaatttgtgccggagcgttttaacaagatttatttacactggctggagaatatcaaagactggtgtatttccagacagatctggtggggacacagaatccctgcatattactgtgatgaatgtggagagtttgttgtggcaagagagatgccggaaacatgtccgcactgtggctgcacacactttacacaggatgaggatacactggatacatggttcagttctgcactgtggccgttctccacacttggatggccggacaagacagaagatctggattatttctatccgacggatgttcttgtaacaggatatgacatcatcttcttctgggtaatccgtatggtattctcaggatatgagcatacaggtaaatctccgttccatacagtactgatccacggtctggtaagagattctcagggacgcaagatgagcaagtcacttggcaatggaatcgatccgctggaggtcatcgaccagtatggatgcgatgcactgcgtctgactcttgtgacaggaaatgcaccgggaaatgatatgcgtttctatcatgagagagtagagtcaagccgtaactttgcaaacaaagtatggaatgcatccagatttatcatgatgaacatggaagaaaatgtagttgcagaaccggatgcgtctttgttaaacgaggcagataagtggatcttatccagagtcaacagactggcaaaagatgtgacagagaacatggataaattcgaacttggaatcgcagttcagaaagtatatgactttatctgggatgaattctgtgactggtatgtagagactgcaaaatacagaatctaccacaaagaggaagaaaaagcggctgcagactgcgtactctgggtattgaaaacagtattgaaacaggcgttgaaattacttcatccgtttatgccgtttatcacagaggagatttacagcgtactggtaccggaagaagaatctctgatgatgtccgagtggccacagtttcatgcagagtgggatttcccggcagaagaaaatgtgatggaacatgtaaaagagatcacacgaggtatccgcaatatgcgcgcagagatgaatgttccgaacaaccgtaagaccaaagtatatgttgtgtgtgaggatactgagatctgtgacggaatcagcacactggagaattccatcaagccgctgatgatggcagaaaagattctggtacagcagacgaaagaaaatatcgcagataatgccgtttctgttgtggtaccggatgcagtcgtatatctgccattggaagatctggtagattttgagcaggagatggaacgtctgcaaaaagaagaggagaaactgaaaaaagaaatcaaacgagcagagggcatgctctccaatgagcgttttatcagcaaagcaccggaggcaaaagtgcaggaagagcgtgaaaagctcgaaaaatatacacagatgcttcagcaggtacaggagagaatggccggactgaaaaaataagtgaggttatcaatgaaacatattcatatgaagaaacctgatataaaaggctttttccagaaaatacgaaatttaaagatgcaggatatcaaagagcattttaaggaaagaaaagagcggcgcagacagattctggaaaagcgccgcaatggaaaattcgcgcgtaaaatgcagccggtctacaggatgatgaatcgactttcattagtacttcattacctgttggcatgtgtcttaaactttatcatcgagattatatccaggcattccctgtttgaggcatgggactatctggtagggacaccgaaggtgtttttcttcaacgcctttttgatttttgccacattttctattgtatatctggtcaggagacgtgtgtttgcacggatcctgctcagtgttttctggctggcgcttggagtctgcaacggatatatgctgcttaaaagggttacgccgttcaatgcgcaggatctcaaagcatggtcagaaggtctggcagtgtcgaagaattatttttcggcaatggagtttgttctccttggcatagggatcgtggccgtgatcctgtgggtgatctccatgtggagaagaggcggtcagtacacaggaaagatgcatcgtgtggcggctcttttcggagttgtgatttctatcggagcctatatcggactgacaaatattgccattgacaaaagggttgtttccaattactttggcaatattgcatttgcatatgaagattacggattcccgtactgttttgctgccagtgtctttaatacaggaatttcagagcctgccggatacagtaaagagacaatggatgagatcacagatggcggagagctttccaagagcagtaccggattagaagaaggagagatgccgaatatcatgttcgtacagctggaatccttttttgatccgacagaagtggagtggctgcagttttccgaggatccgattccgaatctgcggaagatgtttcaaaattattcaagcggatattttaaggcaccgtcggtaggagcaggtacggcaaatacggaatttgaagtgctgaccggaatgagtatgcgtttcttcggaccgggagagtatccgtataagacatatgccaagacaaaatatgtggagagtgcggcatctgcactgagtgcactcggatatggtacagaggcacttcacaataacggtggaaatttctacagccgtgcacaggtatataaccatatgggatttgaccattataccagcaaagagtttatgaatattttgcagactacgccaaatggatgggcaacggatgacgtacttttaaaataccttgaccagtctatgaataccacagaagggcaggattttgtctttacagtcagtgttcagggacacggagagtatccgacggagaaagtgattgaaaatccgaagatcgtagtaaccggtccggaggatgagggcaagaaaaacgcatgggaatactatgtcaatatggtgcatgagatggatgaatttgcaggaaatctggtgcgtcagattgaagagcgcggagaaccgaccgtacttgtattctacggagaccatcttccgacgatgggactggaggcaaaggatttaaagagcaaatatttgtataatacaaattatgtgatctgggataatatcggattaaaacaggaagataagaatctggcagcatatcagatcatggcagaagtgtttgaccgtctggatattcattccggaactgtattcaactatcaccagcagagacgtcagacgaaaaattatcaggcagatctggaactgcttcagtacgatcttctttacggaaagcaatacgcctatgataaatatggctctccgatcaaagaaggacatatggtgatgggagtcagtgatgtgacactggatagtgtgatcgagcagctggatggaagttacagtctgtatggagagaactttacgaaacagagtaaggtctatgtcaacggagagaaacaaaccagcacctttttgaacaatacccgtctggatttaaaagatgtggagctaaaagacggtgatgtgattcaggtcaatcaggttggttccagtgagactattttcagggaatcggcacaatacgaatataaggatgaaaaactcaccaaacttccggatgcggaggataaggtggaaacaggacgaaatgcatttgtcaatcaggacaaagatgtaaagaaggaaagtaaagatgagtagagtgacttatcaggaagcagaaacgtatatttcggaattgccgaaatttacgaagaaaaatacactggagcacacgcagaagtttctttcttttctcggcaatccacagaatggaaaaaaggtcatccatgtagcaggcacgaacggaaaaggttcggtctgcgtgtatctggatgcgatgcttcgggcacagggaaagcacacagggcttttcacatctccgcatctgattcggatgaatgaacgcatccggatggatggagaaccggtttcagacgagacatttacccgtctgtttttacggacacaacagagcgtaaggagaatggaggccgaaggccttcctcatccgagcttttttgaatttctgttcgggatggcgatggcaggctttgaggaagcaggcgtggaatatgtaatactggaaacaggactgggcggacggctggatgcgacaaattctatcagcggtccgcttacctgtatcctcacatcgatcggactggatcataccgagattctgggaaatacgctggaagagattgcggcagaaaaggcaggaatcttaaagccgcatgttcctgtcatatttgcagatacacagcaggagagcagtcgggttattgaagagcgggcaggagagcttggctgtccttgtaaaaaaatagggaaaagtgcgtacgaaattctgaaaattcaggacggaactcttgcattttctccgtcaaatgcgtattatggagatactacatggaaattgcagaacactgccatgtatcagccggaaaatgccatgcttgccatggaggccatgcgtatgatcttcggagagcagggagatgtctccggatggagagaggcactttcacaggtgaagtgggaaggcagaatggaagagattctgccggatttttatgtagacggcgctcacaatgtgagtgcggtaagaatgtttgtgcagagtatccaaagagacagacgagaaaagattgtgttattttctgctgtcagagagaaaaattacgaagagatgatccggattctctgtcaggagaaaagcgtcagcgaatatgtgattactttgatcgaagataagcgggctgcacaggcagaagaactaaagcggatatttcagaaatatacagacaaacctgttgtggtaaaagaagaactgcaccaggcacttacatatctattctcccgaaaggcaggaaaggcggtgtattgcctcggatctctttatctgacaggaatgataaaagcgataacagaggaggcagggtgatgctggactatgaaaaagaactcaaaaatttcaaaccgagtctggaggtagaagaaatcgaagacgcggtttatcaggaagatctatcagatatgacagatcttttgaaacaggtcatggaccagaagacaaagtaaaggattatggtgaaatagatgaactatacggagaaaatcctgcaccagtcaaactactggtacaatgatgggctgaggaaggcgcagatcagggatatgtccggtgcgattacctctcttcggaaaagtctgcagtacaacagggcgaatattgatgccagaaatcttttgggtctcgtgtattatggcaggggagaagtagcagaggggcttgtggagtggatcatcagtaagaatttaaagcctaaggacaatctggcggatcgttttattgatgaagtccagaaatcagcaaaaaaactggagcagatcaatcaggcagtcaagaagtataaccagtgtctgatttattgtgaacagcagggagaagatctggcgatcatccagctgaaaaaagtgatcgcagcacacccgacatttttgaaagcgtatcagcttcttgcacttttgtatcttcatactgcacagtatacaaaggcgcggcagattttaaaaacggcaagaaaactggatacgacgaatgacattacgctgcgctatatgcacgaattatcgctgatcggcgggcagaagacaacgaaaaaatccagagaagagagtgtggagtacaagctgggcaatgagacgatcattcagccggcacacggaaaaagagtcagacagatttcagggaaagtaacggcaggcaatatttttgccggggtactgatcggagccgcaatcgtctggtttctgatcgttccttctgtagatgaagcgaaggtggcaaagcagaataagcaggttgtagaatacagcaacaggatcaatgcactggaagcacaggtcagtgcacagacaaagacattggatgagtaccgggcacaggattcggacaaagaagcgcaggcgcagagcgcggccaggacatcggagagttatgagaatctgatgacggtatccagccagtatgagagcggagagtattcagatgtgactctgacagatacgcttctgaacgtgaaccgggatgcactgggacagagtgggcaggcactttatgatgagctctcaacagagatttttccgggagcctgtgagacaaaatatcagaatggaatggcagcactcaatgttgcaaattatgagactgcaattgacgcactgggaaaagtagtgcggatggatgagcagtatgacagtggagctgccctgttaaatctcgggatcgcttatatgagaagcggtgacaatgagaatgcaaagacttattttaatcgtgtggcggagctgttcccgggaacagaaaatgaggcgacagccaaaagtaatttgaactcaatgggtgataccgctgcagacgataccaaaacagcagatgatacgcaggaataagatggttgaaaaagctacgaaagagaaggatatgcaaaaagcatatccttttttaagtgcgcttttacgtgcatgttcgaacgggtgaaaggggatttgagacaatgagtatggaatatcaggtgcaggaaaattgtctgacgatttttcttccaaaagaggtggatcatcacaatgcagaggaagtgaaaaagagtgcagatgcgatcatagaaaaagagcatatcaaatatgtcatttttgactttgaacagacagattttatggacagttcgggaatcggcgtgatcatgggaagatatcgaatgatctgtctgatcggaggagaggtgtgggcagttcatgcaaatgccaggataagaaagatcctgaccatgtcgggagtcacgaaaatcatgcagatatatgaggaggaacaggtatgaaggataccaatgaaatggaaattttatttgacagccgttcagaaaatgaaggatttgcaagagtagcagtagcagcgtttatgacacagttaaatccgacggtggaagaagtttcagatgtcaaaacagcagtgtcagaagctgtgacaaatgcgatcattcacggatatgataatcagatctgtaaggtctctatccgatgcagtgtcagaggaaaagaactgacggtagaagtcagagataccggaaagggaattgaaaatatcaaacaggcaatgactccgatgtatacaagcaaaccggagctggaacgttccgggatgggattttcttttatggaagcgtttatggataacgtacatgtaatctcagaacccggagaaggaaccagagttattatgaaaaagagcatagggaaagaaagggagacatggatcacacaatcgctttgatcgaaaaatcacacaatggagataaagaagcgagagaacaactggtggaagaaaatatcgggctgatctggtgtgttgtaaaacggttttacggacggggaatcgaggcagaagatctttttcagatagggagtatcgggcttatcaaggcaatcgacaaatttgatctgtcctatgacgtgaaattttcaacctatgccgttcctatgatatccggagagatcaagcgttttttaagagatgacggaatgatcaaagtcagccgttcacttaaggagctctcttaccggatctctcagacgagagagaagatggcagacggactgggaagagagccgacactggaagaactgtcacaggagatgggaatagaaaaagaagaactggtgcaggcaatggaagcctcgggagaggttgaatctctgtatcgcccgatccatcaaaaagaaggaagtgagatttcgcttctggacaagttggaagaaaaagaacaccgggaagagaaaattctggatcgaatgctgcttgggcagctgttggaaaaattagacggacaggaaagaaccttgatctatctgcggtattttgcggaaaaaacacagtcggcagtgggaaaagaaatgggaatttcccaggttcaggtgtccagaatggaaaagaaaatcattcaaaatttaagagagatgacgcactgagaaatcgcattgtaaagggtatattttttcatggatgtcagatactaaggtcagaataaaagtaggaggatgatcaaagtggaaaacggaaaacgaaaaataatgtggtgtctgacaatcctggtagtggcagcagtagcgatcggagtaatttactatgtgaagacaaatatgtcgtcggcacagcagacaaaaggctacctgatccggaaggtggaggagatgtcccatggctgttaatcaggatacgctgtatgtaaaaggagacagaaatgtagaagtgacaaagcgggaagtgacacttggagatctggtttctatggaatgcagtaaccgcgttatcctgccgcatttgaagacaatgaaggtcttgaaaattccggaaaatggagaaaagcggtatgtgatttcgattttaaagattattgcgtgtatccatgagaaatatccgggtctggaagtgcagaatctgggagaaatggatttgatcgtcacatatgaaatgcagaaaacacagtcaaagtgggtacatgtggcaaaaacgatcctggtagtactgatcacattttttggagcggcgttttctatgatggcatttaacaatgatgtaaatgtggataagctgtttggatctatctattactggatgacaggaaaacaaagcagcggatttacaatactggaggtctcctattctgtaggaattacgatcgggattctggtattcttcaatcattttggaaagaggcggttttctgtggatccgacgccgatggaggtgcagatgcgtctgtatgaaaatgacatccagacaacattgatcgaggatgctgcacgaaaggaggaagaactggatgtgggcagagcaaatcgtcctggggctcataggacttagctccggagttgcagtggcaggcggattatttgcatttatcgtagaacttggagtagtagcagatctggctgaccggacacatacggcagaaaatcttttgctgtatgaggattctatcgcacttggcggaattttaggaaatgccctgttttgttttcagatcaggattcccggtgcaggctttgttcttccctttttcggcgtgctgtccggcatatttgtaggatgctgggcaatggcattggcagaaatcctgaatgtatttccgatttttatcaggagagtaaagctggtacgctatatcaagtggtttatcatcgggattgcacttggaaaaggctttggagcatgtattgcattttttcaatgacagagttaagttactggtcacaaagtgataaaatttacaaaatttatagaaaattaacaataaattagttgaaaatatacaaatcctatagtaacatgaagaaaatacggatttgaaaggagtttactaatttatgaaaggttatgcaatgctgaaaattggggaatccggatggattgaaaaagagaggcctgtatgtggtccgttggatgcgatctgccgcccgcttgcagtcgcaatctgtacttcggatgtacacactctctgggaaggcgcgattggggagcggcacaatatgatcctgggacatgagtgctgtgcagaggttgtagaagtcggagagttggtaaaggattttaaaccgggagaccgtgtacttgttccggcgatcacaccggactggaattcgctggaggcacaggcaggatactcaatgcattcaggagggatgctggcaggatggaagttctcgaactttaaagacggtgtgttctctgaattcttccatgtaaatgatgcggatggcaatctggcactgcttccatcgaatatttccacagtggatgcatgtatgctctctgatatggtaccgacaggctttcacggagttgagcttgccgatgtacagtttggagataccgttcttgtgatcggaatcggaccggtaggattgatgtcagtagccggaacagcactcagaggtgcttccagaattattgcagtcggaacccgcaaaaactgcgtggaagcagcaaagttgtacggggcaactgattttgtaagctataagaatggaacaatcgaagagcaggtacttgccatgacagatggaaaaggagtagacaaagttgtgatcgcaggcggcggatgtgagacctttgaatcagcggtaaaatgtctgaaaccgggcggaaagatcggaaatgtcaactatctcggaagcggtacttatgtgactgttccacgtgtggaatggggcgttggtatggggcacaagcagatcaacggaggtctgatgcctggcggacgtctgcgtatggaaaaactgggcgctctggtagcagctggcaaactggatgtacaccctctggcttcccatgtatttgaaggatgggatcatctggaagaggcgctgtttatgatgcgtgataaaccggcggatctgatcaaaccggttgtaaagatttcagactgataaggatggcatgagagatgaagattttagtggtatccggatttttaggagcaggaaagacgacatttatccggacacttgcagaacgtaccaaaaaagattttgcagtgatggaaaatgaatatggggcggtcaatgtggacggagatcttctggaacagacgaaagacttaaatatctgggagctgacagaggggtgtatctgttgttctatgcagaacgactttgccacgtctatccagaccattgccaatacagtggatccggaatatctgatcgtagaaccgaccggtgtggggatgctcagtaagatcatagagaatattcagaagattgaatatgagaggatcactctgcttgagccgctacgattctggacggtacgatgtatgatcgttgtatgtctgaattttcagagatctgcgaggatcagatccagtctgcaggcaggattctggtttctaagatggaatctgctgcagagaatgaacggtgcagtttgaaacagaagctgacagcgctcaatccggaagctgagatctgtgtttctcattatacagaacagggagatgactggtgggattcactgctgacatcgtatcttgacaaagagattccaatgaaggaagagcgggagttggatctggaaaatattggactgacggaagtcagcctgcaatcggagcaggagctgattctgtttttgcagggagtagttgcgggtgtgttcggagatatctgcagagcaaaaggatatcttccggtgggaaaaggatggcttcgctttgatgtgacagatcgtacatacagcgttaccggcattgatacgatgccggaggcaaaagctatttttattggaagacaattaaaaagaaactggcttcgtgaagtgctgcaaaaagaattatatgtagaagtatcaaaacgggcgatccgtccgatgcggaaacgaagcgcggtataaaaggggaggtgagattccggatcaggagtctcacctcttcttttaaaactgcatccagatccagtacaaaagtcccagaagagaactggtgcagattccatagagaatgacaggtccggatatggtaaagatcttgcagccaatcccgaatacctgcccttcttttttatactcgatcgccggagctgctactgagttggcaaagccggtgatgggaaccagtgcaccggctccgccccattttgcaatctttggatagagaccaactccggtgaggatgatactcagtaagatcagtgaaagagaagtccagttgctgcagtggtctttgctcagtccgatcatttcacaataattataaataccttgtccgatcacacagataattcctcccgtgagaaaggcttttgccatgttcagataaacattgtgcaccggtgttttcttttttacatagtcttcatattgctgctgtcgtttttctttttctgtctgcttcaaaactatcgcctcctttttcttatttcatagtatccgaaaaaaacggaaaaatattctgtccccggaaagattttcaatcggatgtatatttcatctggtgagatgcatactaacagcagaaagaatttgcaaaaacaggaagaaaagaggagagaagatgaatcagatcagaggcagtcagagcatcagtttcggggaagctccctatttgatcagcagtgcttgtgtagcgggaagcaaagaggcagaaggtccccttggaaagttatttgatatggtgaaccaggatgatctttttggcgcaaaaacatgggaggaggcagagagtaccatgcagaaagaagcatgtgtactggcacttggaaaagcacatgtggatgcaaagcatgtgcgctatctgtatggcggagatcttctgcgtcagggaatcgccacttccatgggggtggaagaattacagattcccatgttcggattgtacggagcctgttctacatccggagaagcacttgctctttctgctatgagcgtggcagccgggtatggggaatatatgctggcagtgacttccagtcactttggaagcgcggaaaaggaatttcggtttccgctggggtatgcgtcccagcgtcccttatctgccagctggacggtgacgggaagcggcgcatttctggtaggcagacagaaaagccatgtgaggatcacaggcgtgacggttgggaaaattgtggactatggactgaaggattcccagaatatgggggcgtgtatggcgccggcagcggcagataccattttaacaaatctgaaggacttcggaagaagtccgaccagctatgaccggatcattacaggagatctcgggtatatcggacagagtattttactggattttatgagtaagaacgggcatcagatgcgggacagacacctggactgcggaatgaagatctttgatcaggagaaacaggatacgcatgcgggaggaagtggatgcggctgtgcggcagtgacgctttccgcctatattcttccgaagattcagagaggggagtggaaacgggtactctttgtaccgacaggtgccctgatgtctacggtcagttacaacgaaggggcaagcgttccgggaattgcacatgggatcgtgctggaacattgctgagaaaaggaggagattaagatggaatatgtacatgcgttctgggtgggaggtctgatctgtgcggcggtacagattttgatggaccggaccaagttgatgccgggaagaatcatggtgctgcttgtatgcagcggcgcagtgcttggatttttgaatatttacggaccatttcagaaatttgcaggagcgggagcgagcgtaccgctccttggattcggaaacgtactgtggaacggtgtcaaagaagccgttgagaaaaatgggtttctgggaatctttatgggtggttttaaagccagtgctgtgggaatttcagcagcattaattttcggttatctggcatctcatatctttgaaccgaagatgaaaaaatagacaccgtgtctttatgttaaggaaatgtaaagattttgttgttttttgtcgagtataatgttatcgtaatagtgcggaaaattttataaagggtttattacaggaggaaacgtatggattacgtgagcattattctcccatttatcgggggactgggtatgtttatctatggtatgcagatcatggcccagggattggagaatgcagcaggcagcaagatgaagagtctgctggaggtactgacaaagaataagttttttggagttttgctcggtgcttttattacagctgtcattcagagttcatccgctacgacagtgatggtagtcggatttgtaaatgcagggatcatgaatcttacccaggcgatgggagtgatcatgggagccaacatcggtaccacggtgaccggatggctggtatccagtgtcgagtgggcaaaagcgctcagcccggcgaatattgcaccggtggcagttatgatcggtgtgattgtgatgctgacaggaaaaagacgttctacaaaggatatttccagtatcattgtgggatttggtatcttattcatcggtattacgacgatgtcagatgcagtcgagccgctgcagcagtcagaggcattctgcaatctgtttgtaacactcggacacagtccgttccttggaatcgtggccggtgcgcttgttacagctgtgattcagagttcatctgcatcagtgggaatcttacagagtcttgcggcagcagggctggttccgtttaatgcggctgtttacattatcatgggacagaatatcggtacctgtgtgactgccatcatgtccagtatcggggcaaagaagacagcaaagacagcagctgtgatgcatctgttgttcaacatcatcggtacgatcatcttcagcgttgttgcaattgtattctttaaagtgatcaatccgggatttggagaaggcctgatcacacagacagagatcagtacagttcacacgatctttaatatcggaactacgatcctgctcttcccggtatctgactggatcattaagctggcgaagaaactggagagagaagattctgacgatgtggatgaaggacaggtacttctggacgacagaatgctggagacaccaagcattgcgctccagtctacagtcagcgagatggtaagaatgggacatgttgtgcggggaaccatggatcgtacaagagatgtgctgatcaccaagaagcgtgaggagatagaaaagatccgggaggaagagacaatcgcagacggattgtgcaaaggaatcacagagtatgcgattaaactgaatacactttccatcaatgagaaggagcatcaggaggtggcgagtatcctgcagatcgtatcggatatcgagcgtgtcagcgattactgtgaaaatatttctgaatttgcagagaatctcaaagatcagaaagcatccttctccgagatcgcaagagaagagatccagcagatggaagacgtctgtatcgactgcttccggtatgcgatcgaggcactggaagagcgcagcaaagaaaaggcgatgaaggtcattgaaaaagagagtcaggcagatgagctggagatcgcactgcgtacggcacatatgaagcgtctggcaagaaatgagtgcagcacggaatccggaatcgtattcctggatgcattggtatgtcttgagagaatctcggatcatgcgagaaatatcgcagaagagattttgacggcagaataggggattttacaaaacaaagagagcggggcatttgcaaaaaagcggcaaatgccccgtttttgcgcagtttttttcatattttacaaaaacttaacaaggaaaagaaaggtgattttacatagatttaacattcagatgatgatatattttacaattcttctgtatcattgctaactgtggagaaaagaaaaaacacttttgaaaaaaaggagattaagtaaaatgaaaatgaaaaagtttatcgcagttttggcaacagtaggtatggtagcagcactggcagcaggatgtggttctggagatgatgcatctgctgataaaggaacaaagacaggaagtgcgtccagtgactgggattcttccaatgatatcacgattgtatccagagaagatggatctggaacaagaggagctttcgtagagctgtttggtattcaacaggaagttgacggagaaaaagtagatatgacaactgtggatgcacaggttacaaataatacatctgttatgcttacaacagtagcaggggatgagtatgccatcggatatgtatctctgggatctctggatgagagtgtaaaagcgcttaagattgatggagcagaagcaacagaagaaaatatcgaaaatggttcttacaaagtatcaagaccgtttaatattgcagtaaaagaaggcgctgataatgaagttgcaaatgatttcatcacctatatcatgagtacagaaggtcagaaaatcgtagcagacaacggttatattccggttgccgatacaaaagcatatgatggaacaaaaccgtcaggaagcgcagtagtaggaggatcttcttctgtatcaccggttatggaaaaactgatcgaggcatacaaaagtgtaaatccgaatgcaaagatcgagctgcagacatctgattccacaacaggtatgacatcgactctggaaggaagctatgatattggtatggcatcccgtgaactgaaagaggaagaagtgggacagggattacaggcaacggtgatcgcaaccgacggaatcgcagtgatcgtaaacaatgacaacccgacagaagagttaagttctgaccaggtgaaatccatctacacaggagaaacttatacctgggatgaagtaactgaataattgataagaggaaagaagaatgaaatcaaaagcatggactgaaaaattcacgcagggagtattcttgatagccgcctgtacttctgtactggcggtagctctcatttgtatctttttgtttgcaaatggagtccctgcaatcagagaaatcgggttcgtaaaatttattaccggagaactgtggagaccgaacaataatctgtttggaatcttcccgatgatcatcggaagcttatatgtaacagcaggtgcgatcgtgttcggagtgccgattggaattctgacatctgtatttatggcaatgtactgcccgaaaaaaatatacagaccgctgaaagcagcaacagagctgttggcaggaattccttccgttgtgtatggattcttcggtctggtcgtactggtgccaatggtacgggagttcggaagaacattaaaacagatgggaatcgtggaaaaagcaggagacggaaaaggacttctcactacgtcgatcattctgggaatgatgatcctgccgacaatcatcggaaccacagagagtgcgatccgcgctgtgccgacccattattatgaaggagcactggctctgggagcaacccatgagagaagtatttttacagttgtgatcccggctgcaaaatccggagtactggcaggaatcgtgctgggaatcggacgtgcgatcggagagaccatggcagttatcatgatcgtgggaaatcagccgagaattgcacaaaatatcctgcagggaatgcgtacgctgacaggaaatatcgtactggagatgggatatgcgacaggtctgcacagggaagcgctgatcgcgacaggtgtagtattatttgtgttcatcctgatcatcaacttcagtgtggcaatgctgaaaaggaggacagaacatgagtaatcagactggaatcggagaaaagctgaaaagctatttaaaacatccgggttcatttattgtaatgcttctggtgatgctgggagcaattatcacgtttgcggttctgctgtttttgatcgcttatattctgatcaacggagtgccgcatatcaaaccgtctttgttcgcgttagaatatacatctgagaatgcctctttgatgccggctttgatcaatacgattatcatgacgttgctttctttgttgatcgcggttccgtttggaatcttctctgcgatcttccttgtagaatatgcagggaaagggaataaatttgtggaagtgatccgtctgacaacagagacactttcgggaatcccttccatcgtatatggattgttcggaatgctgttttttgtcaatacattaggatggggattttccctgctggccggtgcgtttacactggcgatcatgatccttccgctgatcatgagaacaacagaagaagcgttaaaagcagttccggattccttcagggagggaagctttggactgggagcaggaaagctgcgtaccgtatttaagattgtactcccgtcggcaattcctggaattttagcgggaatcatcctggcggtcggaagaattgtgggagagacagcggcgctgatctatacagcaggtactgttgcacaggtaccgtcaaatgtttttggttctggaagaactctggcagttcatatgtataatctgtccagtgaaggactgtacatggatcaggcatatgcaacagcagtcattcttctgatacttgtagtcggaatcaatacgatttcgagcgtaatcgcgaaaaaactgacaaaagcatagagagaaaggaataaacaatggggaagatcagtgtgaaaaacctggatttatattatggagattttaaagcactcaaaaatatcaatctggaaatagaggcaaataaaattacagcgtttatcggaccgagtggatgcggaaagtccacgttattaaagtccatcaaccgcatgaatgatctggtggaagggtgccgcatcgatggtgagatccttctggacggacagaatatcttcaaaggaatggatgtgaacctgttgcgtaagcgggtgggaatggtatttcagaaaccaaatccgtttccaatgagcatttatgataatatcgcctatggaccgagaacacacggaatccgttccaaagcaaaactggatgatattgtagaaaagtcactgcgaaatgcggcaatctgggatgagtgtaaagaccgtctgaaaaaaagtgcgttgggaatgtccggaggacagcagcagagactctgtattgccagagcgcttgcagtagaaccggaagtacttttgatggatgagccgacatccgctctggatccgatctctacatcgaagatagaagaccttgcgatggaactgaaaaaagattatactattgttatggtaacacataacatgcagcaggcggtacgtgtgtcggataacacagcctttttccttcttggagaagtgattgagtacaacaatacagaaaaattgttttccattccgtctgataagagaacggaagattatattacagggaggtttggttaatttatgcgcaacaaatttgacagacagctacagatactggatgagcagcttattcatatgggtgagttgtgtgagagtgcgatcgcgaatgcgacaaaggcgttgagcgatggaagtatggagcaggcaaaggcagtgatcaatgcagatgctgagattgatgagatggaaaaagatattgaaaagctttgtctgaaactgctcttacagcagcagccggtggcaaaggatctgagaagaatctcagcggcattgaagatgatcacagatatggagcgaatcggagatcagacggcagatattgcagaaatcgtaatttcagccaatacagaggaaagcgtagatatcaaggatatcggaagaatggcatctgttgtaagtaagatggtgcgcgacagcgtcacatcgtatgtacagaaagatctggagcttgcgcgccaggtcatgctggaagatgataaagtggatcgcctctttgacgatatccgggaagagatggtaaattatatcgcaatcaataaagggcagcggggcagccggatcgtggatctgatcatggtgacaaaatatctggagcgtatcggagatcatgcgaccaatattgcagagtgggtggaattttccattacaggagtacaccgaaacggagtgaatgtataagtgtaaaaaggagaaaagatatgatttattgcgtggaagatgatgacaatatccgcgaactggtcatttacactctggagacgaccggtcttaaggcaaagggatttgcagaaggcacggcatttatggaagctttggcgtttgatacgccagagcttattttgcttgatatcatgcttccgggtgaggatggtctggagcttttgaaaaagctgaagaattccgcaaagacgaaggacattccggtaatcatggtgactgcaaagggtgcagagtatgacaaggtgatcggtctggattcgggagcggatgattatgtgaccaagcctttcggaatgatggagctggtatcaagaatcaaagcagttcttcgaagatccggcagagtgcaggagcaggatatgctgtcagtcaacggagtcagtgtagatgtgaaaaagcatgaagtgaaagtggcaggagatattgtgacactgacactcaaagaatttgagctcctggagagactgatgagaaaccagaatatcgtactgacaagagatcagcttttagaggatatctggggatatgattttgatggagagacaagaacggtagatgtgcatgtgcggacactcagacagaagctgggagaaaaaggcgatattatcaagactgtacggggagtcggctacagaataggaggaggcaatgaaggctaagatccagagaagtatgcttcttgttctgtttgtgacgatcctgattttttatggacttttgacactggttatgtatcagaagaacctgacgctgctaaaagaagaagtgaatcaggaggccaggtatatccggactgctgtcgatatttcgggaccagcgtatctgaaagaaatggacggagtggatataaaaacccgggtcacgagaatcagtacggagggaaaggtgctttatgattcaggcaatgacgcagaaacactggaaaatcacagcaaacgtccggaggtaaaagaggcgcttgcaagtggaaccggtgaggatgtccgcgtatccggaaccgttggaaaagagatgtattattatgcgatccttctgcaggatggctctgtacttcgcgtggcaaagacgatggacaatctgggagctatggcaagagatacacttccggtgatcggggtactggcagttgtgatgatgatatttgcatggattctcgggcgctggcagacagaacggctgattcgtccgatcaatgaactggatattgagcatccgctggaaaatgtggtctatgaagaattaaggccgctgttgactgcgatggacagacggaacaaagaaaaagcggcagtggaagatatgagaaaagagttttccgcaaatgtctctcacgaattgaaaacgccgctgacttcgatttccggctatgcggagatcatgaaaaacggactggtccgtccggaggatattcccaatttttcagagcggatttacaaagaagcaaaacgcctgatcacattgatcgaagatatcataaaattatccaaactggatgaaggctccgtagagattgaaaaagaagaagtagatctttacgaactgagcagagagattatcagcagactgtccatgcaggcaagtatgaagcatgttcatgtttctctttcaggagagccggtaacctatgtgggaatccggcagatcctggatgagatgatctacaatatttgtgagaatgcgatcaaatataatgtagagggcggaagtgtctctgtctgggtaggcagcacactgaatggcccaaaagttcaggtgaatgataccgggatcgggataccgaaagagcatcaggagcgaatctttgagcggttctacagggtggataaaagtcattccaaagagcggggcggcacagggctgggactctccatcgtgaagcatggagcgctgcttcacaatgcaaaggtaagtgtggagagtgataccggaaaaggaacacggatggaaattctgtttgagacatctcagtcagagtgatgtaaaagcgttctgggtggttcgtgaaattctgttttgtaggctcgtgaaaatgtggagtaatcctgaaagccgcttgcaaggcaggcctgcgtgatcggcatcccatccaggatcaaagtgcgggcaagcaaaagcctgcggtaggtgatataatttccgatggtatatccggtttccgctttgaagaggcgcatcatataatatttgctcagataaacccgggaagagagaaaatctacgtccagagattctgtcaggtgctggttgatatactggatcagatcgacgatcttcggattgtacagactggtgtccagaaattctacccggtttttaatggcagcccggttgaggtggatcataaattccaaaaataagatctgccggtacagactgccggcatattccgtatcagaaaaagaacgttccaggcggttcgtgatcttgaaaagagagcttttttcaagagaatgaatgcgcagcacattggaatgttctttttttgctttttcaaaacaataggaaagatcatagtcatcagtccggtaggcatcaataaaaccgggagaaatatagacgatgatccgttcatagggaagagaaggatccacctgaaccctgtggatatcattccggtttacgaggacaatgtcgtaaggttccaaaggatatgtctttccttctacaaagtattgcacattaccggaaataaaaatcgtgattttgtggaattcgtggtaatgaaattcaaattctgtggaaatctgatcggtcagatgaaaaatcttaaagtcactgtttaagtatccacgcttattgtatccgcccataataacctcctgaaaaataagatactttcagtatagagcattatttgcaatatagaaagcattttctctattctatttgaagaaaatgcgggatataataaaaacagagacaaatcaggaagcaatatcgaggaggcagaaaaatggatatcacattagaacgttatcacgggttgggaaacgattatctggtctatgatccaaataaaaatgaactggagctgaatgaagaaaatgtgaaaatgctctgtaaccggaatatggggcttggagcagacgggattctggaaggaccgttaatggaagaaaagcagatggcagtccgtatctggaatccgaacggaagcattgccgaaaagagcggaaacggtgtgcggatttttgccaaatatttgaaagatgcaggatatgtacagaagaagcattatacaatgctgaccgatggcggcgaggtagaaatcacttacctgaatgaagagggaagcaggctgaaggtttctatggggaaactgtcattctggagtgatgaaatcccggtgatcggagagcgcagacaggttatcaatgaggatatggtattcgggcggacattgtacccggcaacctgtgtatccatcggaaatccgcattgcgtgatcccgatgcaggagatttcagagccactggtgtgtaagatcggaagggagtccgagcgcgcaaggtatttcccgaatcatatcaatacagaactcatgaatgtcattgatatgaacaatatcgcaattgaaacttatgaaagaggagccggatacaccatggcaaacggaaccggagcatgtgcggcagcaggtgttgcgtacaaactgggactgacctctaacaaagtaatcgttcatatgccgggtggagagcttcaagtagagatcggagatgactgggaagcctatatgacgggagatgtgttctatgtggcagcagtaaaattgagcagcgaatttgtggaaatgctgcgtgcagtatagaagagagaagcagagggcggatgctctctgcttttttaatacaagaaattctattgcggccggaactcagatgtgctacgatatctataacaaaagaggaaaggtgatagtatgctgataacagttgattttaacagcgaagaggcaatctatatgcagcttcgcaatcagattatcatgggcattgcgacttcggtgatcagagaaggagattccctgccttctgtacggcagctggcagatactgtgggagtcaatatgcacacagtgaataaagcgtatactgttttaaagcaggagggatttatccagctggacagaagacacggggcagtgattgctctggatgcagataagctgcaggctttggaagagatgcgcggacagcttcagatcgtgctggcaaaggcacattgtaaggagatcaccagagaagaagtgcatgaactggtggatgagatatttgataattatgaatagcaggaggagtatatgcagaatcaatatacaagacaggcagaacgtgcgataaaatatgcagccaggatggcgagaaaactaaagcatccatatatcggaacagagcatctccttttaggactgcgtagcgagatcacaggtgtggcaggccaggtgctggcatcccacggagtggacgaagagcagcttctgcatctgatggatgagctaatcgttccgggagaagagattttacagcaggatgatccaaaagaaagtccgagactggagtatattctggaaaatgcaaagaaagaggcgctgcatctgcgcaccggagatgttggaacagagcatttgcttttggcgatcatgcatgatgcagactgcgtggcagccaggatgctgatcaccctgaacatcaatttgcagaagatcctgcaggatgtattaaatgcggcaggggtagatgcaaaagaatatcaggaagagattcaggaagacggacgtaccagaagaggcgccgttgaccagtactgtacagatctgactgccgaggcagcagaaggaaaactggatccggtgatcggcagagaggatgagatctatcgtctgatgcagattttgagccggcgcaccaaaaacaatccttgtctgatcggagaaccgggagtcggaaagaccgctgtgatagaaggatttgcagaacggatcgcggcagaagttgttccggaagggatgaagggaaaaagagttctgactctggatctgcccgcgctgattgcaggctccaaataccgcggagaatttgaagaacgcatgaaaagtctgatttcggaagtgaaagcggatggaaacagcattttatttttagatgagattcacaccatgatcggagcgggaggcgcagaaggagccattgatgcttccagtattttaaaaccttcacttgccagaggagagattcagctgatcggtgcaacgaccattgcagagtatcgcaaatatatcgaaaaggatgcggcactggagagaagattccagccgatcacggtagaagaaccttcgaaagagcagtgtatggagattttacagggattacaatcccgttatgagtcacatcaccgggtgacaatttcaaaagaggcgctaaaggcagctgtagaattgtcaaagcaatacatcacagacagaaatcttccggacaaagcaattgatgttctggatgaggcttgctcaaaggccagcctgaaaggatataaagtaccggacaatctgcagcagatggaagatgagctgaaagaactggcaaaacaaaaagaagcgagcatccgcaaaggggatatgaaggcagcagcagattttcatgcaagagagaaagaggcagagacaaaactggaaatgctcagaaaacgtttccacaaaaaacaggcatccgcacatccggaggtaagcggagatgatattgcggatgtcgtgtcagtctggacgaagatcccggtacagaaattaaaagagacagatgcacacagattgcagaaactggaagagacactccacaaaagagtaatcggacaggaggaagcagtcagcgcagtcacgcgggcagtgaagcgcggacgtgtgggattaaagagcccgaatcgtccgattggttccttcttattcctcggaccgaccggtgtcggtaaaacagagctttccaaggctctggcagaggcattgtttggaagagaagattctatgattcgggtcgatatgtctgaatatatggaaaaacattctgtggcaaagatgatcggttctcctccgggatacgtgggacacgatgaaggtggacagctcagcgacaaagtaagaacacatccatattctgtaatcttattcgatgaaatcgaaaaagcccatccagatgtatttaacatcctgttgcaggtgctggatgacggtcgtattacagattcacagggaagagttgttgatttcagtaatacagtgatcattatgacctccaatgccggggcgaaagcaatcgtagatccgaaaaaactcgggtttgcagtaaaagaagataaagcagacgattacaagagaatgaaacagaatgtgatggacgaagtgaagatgatcttccgtccggaatttttgaaccggatcgatgagattatcgtattccatgcactgggtgaagagcacttgaagaagatcgtcagtctgatgtgccgtgaatttacaaaacgagtcaagacacagctggatatcagcctgaccctgagggattctgcgaaaaaacggattgcggaaaaaggcaaagatacaaaatacggagcgcgtccgcttagaagagcaatgcagacagagctggaagataagctggcagaagcaatcctgaatggggaagtgaaaccgggcgaacagattgaggcaggagtttccggaaaagaaataaaatttgatttataaatcatatatgtctttttgactatctttttatatcttcttaaatgtccgcaaagccttattttataggctctacgggcattttgcttttgtggtaaacctcacatatctaggtctatcttcttatattttcgctatcaagcgtggttaaaatcgtggtaaatacttcttatgcgattagacgctgaacctctgattttgcggtatctatggacgcatgagcataccagttcattgtgatactgatgtttgaatgtcccatgatatactgtaaatctttcgggttcatgttcttgcttgccagtcttgtgcagaacgtatggcgtagcgtatgtggtgtgatatgtggcaaggggttatccttgtggtgtttgttatatttctttaccatacggacaaataaggcgttgtaatcaatcgcaactttaggattgcctttcggattgacgaacagaaaatctttgtatccgtctatctctatcagtttcccttttgtgcgtttccttatgacccgttgaaatgcctgtatcgtttctctgcttaatggcacttgccttgttccactctttgtcttaggcgtttcaatataatagccctgttccttgctctttaataactggtggtcgataaccacaacctcattcttgaaatcaatatcggctactgtcagtccgcacagttccgagatacgaagtcctgtctttaacagtatcagcacatcatcataatacttgtgatacacgttatccgtcttgatgaatgacagtaaggcttgttcctgttcctctgtcaatgctactttctctttggtatcattttctatgatttcacttaacttgaaattaaaagggtttttccttacacaatcgtcttgtatggcgatatagaatgacgcttttaacgagcgtttatggttgttaatagtgttataggaaaagcctttgtctttcatgcgtaacgcccattctttagcgtcagagggttttatcgtatcaatgctcctagcacctaacttgtcctctttcaataaccgcatgagttgttcccgttgtttctgtgtgcttttcttcacatttgccctctgtgcgttctgtttggcgtagagttggcaaagcgtcattttcttgcctgtgctgtcgataccgtcctcaatatcccgtcttatctgctgttccagttcacgaagtgagggtttttcccgttttccctttggtgtcgggtctgtgggtgtcaatctccaagcatacacatattttgtgtttccaaatgcgtctacatatttatataagtattttccgtctgttcgttggctctctccagtatgcaggatacgttctttactatcccgtcttttttctttcatggtgtctgctcctttccttgttggaaagagccttgatatgacttgtattcatcataacacatacaaggctcatttacattagattgcgtccaatttatcaatgaccttttcaaactgtcggcgtttaatctgtatgcggttgccattcataatgagccagccagcgtccttgttttcctctgccaagcgtcttaacttgttttctccgatacggaaatactttgacgcttcttcaatggtaagggtgtatttttcccatacgggaatgtcgttgttattcatcagataccccctttcccatgtttcgtgtcatactggatataggggataaggtcggtgcggtctatcctctgtaagtgggcggttaatttactggaaagggaactgctgtatcttgccctgtcaagcatagttcccactttttccagtccacctaatgcatcatgttcttctaagaaataaaaacttttgacagcagaaatcacgccaccctctgtgagccattgctgtgtttcctcaagggaattatgtagtttcggtacttgcagtttcaagacttccacagcccctaaaaatcgttcccaaaaccgacacgttttccatctgctcttattactttcatttctgtttggcacgacaaagcgtaggttgtttgctaatagcccgaaagccagttccccaagttccaacggtctgtctttgaatgtcatggcaaaaacatgagccttatcatcacgcagttgcatttctgtccgtttccaactgccgacttcatcaagtgtcttattatgttttgaacagacttccttatccttatcataaaagcggtaggataatcccgatttaccagcaccgatataaacagtctttgcggtgtcgaaatcatcaaacttgctttcgtcaaagtggtagccctcactattagaaataaattcctctttttcgcatttcttctttatctgctctatggtaaagaatggcttttcgttcttatcatcaatggcaatatcaagtcttgtgaaatgaaagttatccagtccgtatcttcgctcacagcgtcgaaacatatccccaaaggtataattcctactgtcgagaatacggaaaatatcatcacaacctctgccggtcataacaagataacagcctagcccctgtgggttatcctctgtctttcttgcgtcccccgatacataaatatctccaatctgccagcgtgcttgataagtcttgaattttatcattgctggataaacattgaaaatgtcagtcggtaaatctaaaatgtgcatgattatatcttcagcggttgcagtatcaaatacaatgctgatgtaatcaatcttaacggataaatttttgtgtgtagttatagtgcattgctcctttcgtatgccccgttttttgcgggtaaaaatcgtgttttttcctttatttatcacagtttctaggtactatgacatgtatacgcagggcggtgttacatatacgccctttacgaacgcctaaaggcgttccctttcttcctgtgtctgccccgttcttaacgctcacgagccttgtaaggctcgtggctaaacggaacagccccagtcagaaaccttattttcggtctgatagtccatgcttattcatgctatcaaagtgaaaatatatattttatatgcttactcaagcgtgtgattgaccctagcgtgcttaatcactctgtctaatacgataataactccattagaattacttgtcaagaagtttttgttgacttttagatatagattaagtatgatatgcttataaataccaagaaaagcaacgaaaggagcggttatactaagttatggagcattatgaaaagaaaatcagtttcttaggagaaaacatacagaccataagaaaacacagaggaatgaaacaacaggaacttgcggacaaaatcggtatcaatatgcagagcctttccaagattgaacgtggcgtgaattatcctacctttgatacgttagagaagataatggacgtgctgggtgtaacgcccaatgaattattgtcgggagaatggaagtatattgaccacaccgagccctatatcatggatattatcaaacgggaacaagacttcaatgtttccttagattacctgtctgaaaatgaatttttcgatgatgaaaaagaatgcacattttacaaggcatataaactcatacagtatatccataactacattaccaatgaggttacggagttggaagaacttatggaaatcaagcagttgatacagcgtcaaaaactggaacgcatgataaaagtgcataaggaaatgcgagggttagaccgatacagagaacagcccaaagagtataaataccatgacccttatgatgattggatatttcgtcagcttgcggatatagacaacagaaacaacattcccgacacttctccacaagtagacttcaatgaagcagactatgaagattatctaaaggcgaaatggaacagaggtctttaatttcctcttgcatggaagatacagcaaacaaaaagcccagtaaagagtgcaaagcaccaccaatggtggcaaggctcttgacagggctttttcttttctgttgtggggtaatcaagaggaagaaagaaaaagtgtgcatttttgttccataaatgttaagggtatgctgatttttattgtggcggatatatggaactgttataatatggatatgaagaaagcgacaaatttgaaagtgttaataattttcaaacagcctcattgcatggaaataagaaacagactatccttaaagtaggaggtggcacaaatggcaaatgaagataaaaaagattttaatgctatgttgcatgatagtaaggatatgccaaaatttcaaattatcatagaccagaaaagtattgagaaatatggtggaaacaaaatgtattttgctcccccgattgactatgacaaagtaatgaaaaaagttccgtatggtaaagtgattacggttggaaaaatacgagaacactttgcaaaattgagtggtgcagattttacagagccgattacagcgggtatatttgtttctattgtagcgtgggcgagttatcagcgttccgaagatgaaacaccctattggagaacattaaaagcaaacggagaattaaatgctaaatacccaaatggtattgaagcacagaaagaaaaattagaagcagagggacataccattattcaaaaggggcgtaaaaatatacgatactatgtaaaggactatgaaaattctctttttgatttgaaataggcaaattctatttcacaatttcatatctctatacacaaagcagttagtcttaggattgactgcttttttcatacctaaatttcagattggagtgatgaaatggtgtttgttagagctgttcaataagattatcggtgcataaaattttattgtggtgcagatatgaaaatgatataatgtggatatgaagaaacggacaaattagaatttgtcgagctggttagttcgagataattttgagtttgttaagatgtggtgcacttgatggaatcacaggtacgacatcatattatggaggatgaaatagatgataggtttgattgttgcgaggtcaaagaataatgttataggcaagaatggtaatataccatggaaaataaagggagaacaaaagcaatttagagagttaacaacgggtaatgtggttattatggggcgaaagtcttatgaagaaatcggtcatccgttgcctaatagaatgaatattgttgtttccaccacaacagagtatcaaggagataatttagtttcagttaaatcattagaagatgcattattattggctaaaggacgagatgtatacatatctggtggatatggactatttaaggaagctttgcaaatagtagataaaatgtatatcacagaagtagatttaaatattgaagatggagatacattctttccagaatttgatatcaatgattttgaagttttgataggggaaacacttggtgaggaagtgaaatatacgagaacattttatgtaaggaaaaatgaattgagtagattttggatttagggtgttttcataaatatattgctttttatgcatatataaattgttgtaagacaaattccagtttgacaatttcatatccatacacacaaagcagttagtcttaggattgactgctttttaaaaagacaccatttaggtgtaatgatgtcttttgggtgttattttataggtcatatcaaggctcattcaatcgtggtaaaatcgtggtaaaatgagttttttctatacttcaaaatacttgaaagtatagtgtttatgcggataatcgaaaattagatataaaattttacttaaagaatgcaaattaagtagaaaaagaatttgatatattatataatacagacagaagaaaagagctcttgccgcaagtgatggcgggatgcagaaatacctaggaggacaaggaaaatggcaatcgtaaaagaattattacgcacagaagaagacggaagactgagttttggagactatacactggcgtctaaaacgaagctggataatttcgaatttgagggcgacttatataaagtaaagacattttcagagatcacaaaattagaaaaaaacggaatgtttgtatacgaatctgttccgggaagtgcggtagagaactttaaactcacagatacagaggtcgcttttcagatttctgcaccggaggatgtacagtttacactggaacttgagccggagagtgaatacgaagtgcttctggatggtgtttcagccggaaagatgaccacaaatctgagcggaaagctgagtgtcagtgttgagatcagcgaaggggaagctgtggacgtcaaagtagaaaaatgctgattgcaagagtagaagacattttataatcaataagagcagagagctggggctgtgaatgaaaacagcgttcagctcttttttatggaggagtatatggcaaaaggaaagaaaagtatttttttctgtcagaattgcggacatgaagaggcaaaatggctggggcaatgtccggtttgtaaagaatggaatacattcgcagaagaaaaagtgagtgccggattgagccgcgggacaacggcagctgcaaagcagagtaaaacagcagaagtagttccgctttctcagatcagtgccagggatgataccaggatgctgaccgggatgaaagaactggatcgggtgcttggaggaggtatcgtctccggttctctcgttctggtcggaggggacccggggattggaaaatcaaccctgttattgcaagtgtgtcagaggctgtcggcatcaagaaaaattttatatatttcaggagaggagtcgcagactcagatcaaattgcgtgcaaatcgtatgggaagttttacagatcatatgctgttgttatgtgaaacaaatctggataccatacgtacagccattgagagacaaaatccggagcttgtgatcattgattcgattcaaacgatgtacaatgaagaagtatcctcagcgccgggaagtgtttcgcaggtaagagaatctacccatgtgctgatgcagctggcaaaggggatggggattccgatctttattgttggacatgtgacaaaggaggggactgtggcaggtccgagagtgctggaacatatggtggatacggtactttattttgagggagacagacatgcttcctatcggattctgcgtgcggtaaaaaaccgttttggttctaccaacgagatcggtgtgtttgaaatgcgaagagaaggactggtagaagtggaaaacccctccgaatatatgctgagcggaaagccggaaaatgcatctggttctgttgtggcatgctctatggaaggaacacgtccgattctgatcgagattcaggcgctggtctgccagagtaacttcggaatgccaagaagaacggcagcaggaacggattataatcgtgtaaatcttctgatggcggtactggaaaaaagaattggactgccgctgtcaaattatgatgcctatgtcaacattgccggagggattaaaatgaatgaaccggcgattgatctgggaatcatcatggcgctggtttccagttacaagaaccgggcgattgatgaaaagatgatcgtatttggagaagttggattaagcggagaggtgcgtgcagtcagcatgccggaacagcgagtggcagaggctaaaaaactgggatttgagacctgtatccttcccaaagtatgtctggatatggtaaaagaaatcaagggaatcaaactactgggggtaggaaatatcagtgatgcgataaaccttctgtaaatagatataaggatcaatctcgaattcaaaaatgcaggcgaattgtctgaattatctgaattaaataaaaaataaaaaaatcattgacaattcacctgcacagtgataagatagcacatgtcgctgaaacagaccgaagaagagaacgaaagccgcaaggccgcgatgggacaggatgcgagagcagatcgctggacaacgtgaaaaaagttcttgacagaaggatgcggatgtgataacctattaaagctgacttgtgaggaagaaacacttccggaacagacagcaaaaagaaaatgaaaaaagttcttgacaaagagaaaacggcgtgataaaatatcagagctatttcttatcaacaagaacagcgaagaaccttgataattaaacaatagacaacaaccttgaaaatttcttaagagaagattttttaagaacagcatctaagagatgcacccgtcacatgagaatgtgacagacagtaaaagggatgaattagctagtagttaattctgaccggaacgaacacttttaacgagagtttgatcctggctcaggatgaacgctggcggcgtgcttaacacatgcaagtcgagcgaagcacttttgcggatttcttcggattgaagcaattgtgactgagcggcggacgggtgagtaacgcgtgggtaacctgcctcatacagggggataacagttggaaacggctgctaataccgcataagcgcacagtaccgcatggtaccgtgtgaaaaactccggtggtatgagatggacccgcgtctgattagctagttggtggggtaacggcctaccaaggcgacgatcagtagccgacctgagagggtgaccggccacattgggactgagacacggcccaaactcctacgggaggcagcagtggggaatattgcacaatgggggaaaccctgatgcagcgacgccgcgtgagcgatgaagtatttcggtatgtaaagctctatcagcagggaagaaaatgacggtacctgactaagaagccccggctaactacgtgccagcagccgcggtaatacgtagggggcaagcgttatccggatttactgggtgtaaagggagcgtagacggcatggcaagccagatgtgaaagcccggggctcaaccccgggactgcatttggaactgtcaggctagagtgtcggagaggaaagcggaattcctagtgtagcggtgaaatgcgtagatattaggaggaacaccagtggcgaaggcggctttctggacgatgactgacgttgaggctcgaaagcgtggggagcaaacaggattagataccctggtagtccacgccgtaaacgatgaatactaggtgtcgggtggcaaagccattcggtgccgcagcaaacgcaataagtattccacctggggagtacgttcgcaagaatgaaactcaaaggaattgacggggacccgcacaagcggtggagcatgtggtttaattcgaagcaacgcgaagaaccttacctggtcttgacatccctctgaccgctctttaatcggagctttccttcgggacagaggagacaggtggtgcatggttgtcgtcagctcgtgtcgtgagatgttgggttaagtcccgcaacgagcgcaacccctatctttagtagccagcatttcggatgggcactctagagagactgccagggataacctggaggaaggtggggatgacgtcaaatcatcatgccccttatgaccagggctacacacgtgctacaatggcgtaaacaaagggaagcgagcccgcgagggggagcaaatcccaaaaataacgtctcagttcggattgtagtctgcaactcgactacatgaagctggaatcgctagtaatcgcgaatcagaatgtcgcggtgaatacgttcccgggtcttgtacacaccgcccgtcacaccatgggagtcagtaacgcccgaagtcagtgacccaaccgcaaggagggagctgccgaaggtgggaccgataactggggtgaagtcgtaacaaggtagccgtatcggaaggtgcggctggatcacctcctttctaaggagaaagaagtagaggaagtaagagctattgtttaattatgagggttctcaagaactcagcctttttggtggcgatgcgctcaggggaaacacccgtacccatcccgaacacgatggttaagacctgagcggccgatggtactgcactggagacggtgtgggagagtaggtggccgccaaaacaaaaaaagaaaaagaactggtttcaccagtgattagagattaaaagaggttttagtttctaatgactgatgaaaaaagcagtcagatgtaccttgaaaattgcatacaaagagaaatatcttatgaaaataagagagttgaattaattcaacaagacatccgaggtaatgttaacaacattataaaaaacaaactattaccaacgcatgtaacgctatacatgtgtagataagagaccaacccgtgtttcttgtcagttggttatgctaataagagcgtatggtggatgccttggcactaagagccgatgaaagacgtgataagctgcgaaaagcttcggggaggagcaaatatccattgatccggagatctctgaatggggaaacctacttgagaaaacctcaagtatccacagcccaatccataagctgtggaagggaacccggtgaactgaaacatctaagtagccggaggaagagaaaacaacatgtgattccgtaagtagcggcgagcgaacgcggaagagcccaaaccggagtgcgtgcactccggggttcggactgcagaattgacgagtgagcctagtagaatggttttgggaaagccagccagagagggtgaaagccccgtacacgaaaggcaagcaagcatggcaggatccagagtaccacgagacacgtgaaaccttgtgggaacgcgcggggaccaccccgtaaggctaaatactccttagtgaccgatagcgcatagtactgtgaaggaaaggtgaaaaggaccccgggaggggagtgaaagagaacctgaaaccatatgtttacaagctgtggaacatctttatatgatgaaccgcgtactttttgtagaacggtccggcgagttacgctggctggcgaggttaagggctgaaggcctggagccgaagggaaaccaagtctgaacagggcgaaatagtcagtcggagtagacccgaaaccgggtgatctatccatgtccaggttgaagttgccgtaaaaggcaatggaggaccgaacccacatccgttgaaaagggtggggatgaggtgtggataggggagaaattccaatcgaacccggagatagctggttctcctcgaaatagctttagggctagcctcatgcaagtcttacggaggtagagcactgaattcctaagggggcgtcaaagcttaccaagggatatcaaactccgaatgccgtgtagatggtgcatgggagtcagactatccgagataagttgggtagtcaaaagggaaagagcccagacctacagctaaggtcccaaaatgtgtgttaagtggaaaaggatgtgggatttcgaagacaactaggatgttggcttagaagcagccatccattaaaagagtgcgtaatagctcactagtcgagaggtcctgcgccgaaaatgtccggggctgaaacacactaccgaagcttaggaattgatgaatgtcaattggtagaggagcattcttaccgagacgaagctgtaccggaaggagcagtggattggtaagaagagagaatgccggaatgagtagcgagaggaaggtgagaatccttccggccgaatatctaaggtttccagagtaaagctgatctgctctgggtaagtcggggcctaaggcgaggtcgaaagacgtagtcgatggataacaggtaaagattcctgtactgtatcataacagaactgtggggacgcagacagagagcataagccgggaatggaaaaaccggtacaagcgaggtaggagtgcatcaggcaaatccggtgcacaatctgaagacgtgatgtggggcgtaaagccggaagtatgtgagctggctgccaagaaaagccgctattgtttatgatatacccgtaccgtaaaccgacacaggtggatgaggagagaatcctaaggccgacgggagaagcattgttaaggaactcggcaaaatgactccgtaacttcgggagaaggagtgccatgtaaaagtggccgcagagaattggcccaagcaactgtttagcaaaaacacaggtctatgcaaaaccgaaaggtgaggtatatgggctgacgcctgcccggtgctggaaggttaaggggagaggttagccgtaaggcgaagctttgaacttaagccccagtaaacggcggccgtaactataacggtcctaaggtagcgaaattccttgtcgggtaagttccgacccgcacgaaaggcgtaatgatttgggcactgtctcaacaatgcacccggtgaaattgaaataccagtgaagatgctggttacctgcgccaggacggaaagaccccatggagctttactccagcttgatactgggattcgatattgcatgtacaggataggtgggagactgagaactgatgacgccagttgtcagggagtcactgttgggataccacccttgtagtattggatttctaaccagcagccgtgaaccggctgggggacaatgtcaggtggggagtttgactggggcggtcgcctccgaaagggtatcggaggcgctcaaaggttccctcagaatggttggaaaccattcgaagagtgcaaaggcagaagggagcttgactgcgacaccgacgggtggagcaggtacgaaagtaggacttagtgatccggtggtataaagtgggattgccatcgctcaacggataaaagctaccctggggataacaggcttatcactcccaagagttcacatcgacggagtggtttggcacctcgatgtcggctcatcgcatcctggggctgaagtaggtcccaagggttgggctgttcgcccattaaagcggtacgcgagctgggttcagaacgtcgtgagacagttcggtccctatccggcgtgggcgtaggatatttgagaggagctgcccttagtacgagaggaccggggtggactggccgctggtggatctgttgtattaccaaatgcatagcagagtagccaagccgggacgggataaacgctgaaggcatctaagcgtgaagcccccctcaagatgagatatcccataacgtcaagttagtaagaccccttgaagacgacgaggtagatagggcagaggtggaagtgtggtaacacatggagctgactgttactaataggtcgagggcataaccaagcaaggtgataggaaaaaggatgattctttgtatgcagttttgaaggtacaggatatatagatggaatgagagagcagcaccgataggtgttgtttttttgtgttgttactgtttccacgaatcttttgctttaaaatgacgaaatttggcgataagaagacggtgactgggatgtatattaatgctataatgaagaaaaataagaaaaggagtagagaacttatgaagaatatggggaaaaagatacgctacatagcattttttatcggagtatgtgtcttgcttgcaggatgtgggaagaaatttgatgccagtggttataccaaggcagttttggatgtaagttataaaaacgaaattcagaagtatgtagaattaacaggggcggatgaaaaggaagcggataaaatatttgaagataatcttcaaaacaacatggatataatgctacaagaattttccggctatgaattgccggatgagttggaagaaaagtatcgaaagttgtttagcgatatgatgaagcaagtaaaatatacagttgcagaggcaaaagaagtagaaaacaaaaatttcacggtagatgtaaaagtagagcctatgttaatctttaatgatacctatcaggagcttcagaaacagacagaagattatgctactcaggttagtaatgaagtgatgaatggagcatccttaccgtctgagacagatatgcagacacatgtttttgaaatttatcatgatattttgcggaattatctggatcaggggatgaaatacggggatccggagacgattacagtacatgtaaacaaggatgataaaaatgtatatactattgctgatgaagacatttctaaaatagatgggaaagtgatggcaatggatgtaattgaacaataaaaacagagtgcacctgactttttgggtgcactgtttgtttgtaaatgatgttagaaataaaatattttgaattgtagaaaaaattcaaaaattttcttgacaaacagaggaataacaggtatacttaacaagtattcaagagatacatcatataggggattggtcaaatggtatgataggggtctccaaaacctttggtgggagttcgattctctcatcccctgttcttaggaagtcgtgaaaagttctagaaatagaaggttttacggcttttatttattatcaaaaatatagaggcaatcaaagttcctcttgaacagaccaacgataaaaagttttgacttttttttaaacatgtgataaaatttgtaaggttaaaataaagtgtgaatgataagtacatttgcactttttttatgccttgagaacaaaagagtgaaagatacaaaagagaggagaagaattttgcttacgattacagattatgtgaaagcaaagactttggaagaagcttacgaattgaaccaggcgagaaacagccgtgtaatgggcggaatgatgtggatgcgtcttggaaatgcgagagtaaagacagtaatcgatctgtcagagcttggtcttgatcagattgaagagacagaccatgtatttaaaatcggggcgatgtgtactttgagacagctggagttgcatcagggattacgtgaaatgtatggcaacggaattgcagagtgtgtccgccacattgttggagtgcagtttcgaaatcaggcgacagtcggcggaagtatctatggaagatttggattttcagatgtactgacggcattattggctttggatacatttgtggagttgtataatggaggaattatccgactttcggaatttgtaaatcgtaaaaaagataaggatcttcttctctctattataataagaaaaagcaagcgttccttccgttatgattcagtacggcaaaccaaaacagattttccggtgatcgcatgttctgttgtcactggaatggtcaacggagtagagtcctggtacttttcagtgggagcaagaccgatgaaagcagcactgttggaaaagcagtgggagattccggcagatatttcagaagaagaaatccgggaatatgcaaaaatagtagcttcagaatttgagtatggaaccaatatgagaggaagtgcaaagtatcgtcagcatctggcagaggtactgatcttcagagaaatgcgttcaatcatcacggagggaagagcatggaagtaaggtttaaattaaatggaaaacaggtatcggcagaggtatccggagataccatacttctggatgtattgagaaatttaggatgctacagtgtgaaatgtggatgtgagacaacaaactgcggactttgtacagtctggatcaatggaaaatccagactttcctgctcgattctggcagcagggatagaggggcaggaagtgacgactctggaagggctgaaagaggaagcagaagagtttggtgcgtttcttgcacaggaaggtgcagaacagtgtggattttgctctccgggattcattatgaatgtgctggcaatggtgcgtgagttggagaatccgacaattgaggagatcaaagaatatttatccggcaatctgtgcagatgtaccggatatatgggacagcttcgagcaatccggaaatatatggcagtgaaaaagcagagtgagaaagagaaggaggtgcaggcatggggaacagagtggtaagtcaggcaattcccaaggtagattataaagcgctggtgacaggaaaagcagtgtataccgacgatctggctgcaaaagacagtcttgttgtcaaagtactcagaagtccgtatgcacatgcactgattgaggacatcaatctgacaagagcagaactggttccggatattgaatgtattctgacatacaaagattgtccggacaagcggtttacgatggcgggacaaacatatccggagccgagtccttatgacagactgattctggatcagagagtccgttttgtaggagatgcagttgcgatcgttgccggacggacaaaagaagcggtaaataaggcgttaaaattgatcaaagtaaagtatgaggtattagagcctgtacttgattttcataaagccaaagacaatccgattctggtgcatccggaagaaaactggaagagtctgtgtccggtaggggcagacaacaagagaaatctctgtgcacatgacagctgtgaagagggagatatagaagcggttctggcaaactgtgagtatatcattgatcaggtgtatcatacaaaggcaaaccagcaggcaatgatggaaacattcagaacatatacatatctggatacgtatggaagactgaatgtcctttcgtccacacaggttccgttccatgtacggcggattcttgcaaatgcattggatattccaaagtcgaagattcgtgtaatcaagccaaggatcggaggcggtttcggggcaaaacagtctgttgtttcagaagtttatccggcactggtaacatggaaaacgggaaaaccggcaaagatgatttttacaagagaagaatctatgattgcatcctctccgcggcatgagatggaggttcatgtccgtcttggagctgataaagacggaattattcagggaatcgatgtctatacactttccaatacaggcgcgtttggggaacacggaccgacaacagtcggactttccggtcacaaatcgattcctctgtacgggaaggcgaaagcattccgttttgcctatgatgtggtatacacgaatgtaatgtcagccggtgcttatcgtggatatggtgcaacacagggattgtttgcagtagagtctgcagtcaatgagctggcagaaaaaatgaatatggatccggtcacgctgcgtgagaaaaatatggttcgtcaggggcaggtaatgcctgcatattacggggagacggcaaacagctgtgctctggaccggtgtatggaaaaggcaaaagaaatgatgaaatgggatgaaaaattcccgagccgtgacatgggaaatggaaaagtcagaggtgtcggtgtggcaatggcaatgcagggatcaggtatttccgctgtagatacagcatctgttggaattaaagtgaacgatgatggattctacagtctcttgattggtgcttcagatatgggaacagggtgtgacacgattttgtcacagatggcagcagaatgtctggattgtgaaatggatgagatcattgttcatggagtagatacagactcttctccttatgatacaggttcctatgcatcaagtactacatatgtgacaggaatggcagtcgtacgtacctgtgaaacactaaaagacaaactttgcgaaaaaggtgcacagtacctggaatgtgatgtggacgatgtggattttgacggacagtgtgttgtgaatatcaaaacaggtgcatccatttcgagagcggaaatcggaaaccgtgtgatgtgcaacaatgaagaggcgctctatgccagtgaggcatacagctcaccggtttcaccgccgccgtttatggtcggaatggcggaagtggagattgacaaagaaaccggagaactggaattgattgattatgtggcagtagtagattgtggaacggtagtgaatccaagtctggcgagagtacagacagagggaggacttgcacagggaatcggaatggccatgtatgaagatgtcatctataatgcaaaaggaaaaaattacagcaattcctttatgcagtataaaatcccaagccgtctggatgtgggcaatatccgggtggaatttgaaagcagctacgagccgacaggtccgtttggagcgaaatcaataggcgagatcgtgatcaatacgccgtcccctgcgattgcaagtgcagtcagccatgcggtcggagtaaaagtgagagaacttccaattaccgcagaaaaagtgttctgggggatgcaggaagaagattaagaaaaatctccatgtccgatgaaaattggatgtggagattttttagaaagtgactttgtgaaagagtaacaaaaacaagaaaaatagaaaaaacagctgtactgctctacagaagcatgttataatcatctacatcaataagaacaaatctggtaaattcttattcttattaatctgcatacatttcttaatgttgtaaaaatctcagtcaaataaacaatgcattgcttatgaaaatatgtttccaaaaaataatataaagataaaagaaggagtttattgtatgggtatgacaaatgaacaattgctgcagtctatcaccacggttatcgtagaccgttttgatatgctggatggaagaatcgagaggttggaacagcgggtagataaaatggacaccgagttccgacagaaatttgaacaaatagatcagaagtttgaacagataggccagaaattcgaacagatagaccggaagttcgagcagatagaccggaagttcgagcagatagaccggaagttcgagcagatagaccggaagttcgagcagatagaccggaagttcgagcagatagaccggaagttcgagcagatagatcagaagttcgaacagatagcccggaagttcgaacagataggccagaaattcgaacagatagaccggaagtttgagcaaatagatcagaagttcgaacagatagatcgaagattagaggatatgaaccaaagactagagggtacgaatcgaagattagatggtgtggagcaaaaattaaaggatatggagcatacgatcatagaagtggaaagcaatgtcctgtcagaattggatacagtgcaggaacatgcgaacaatcgatctgagcgtattgaaaaccgtttggtgtgtcttgaacgcaatggcaatagtgcgccaaattgcgcacttgctttgcggacagaaaagttggaagagcgagtagaagctttagaacgaaaggtatcatggggataagtttatttgctgtcctgtttctgataagcaattcggcttgatccatcttctgtcaggatggttccgcattttttgaaatccagtttagtgagaagactctgcatgacgagattatcctgatgggtgtcaattttcagattgtgacattgtgagaatgcccagcttaaacaaaaagaagctgcaccttttactgtaccgtcagaagcaattcggtgaacgactccgtaaggtgcgtcatttaaccagttcccgtcgtagattgtggtataagtgacatcattttcaaatgcatagtaaaaaacagcaataacgcgattgttttcttcgcagacataggcgttgcccatccggatatcatgttctatcatatcaacaggaggatatgtggttccccattgagtcggatttccatgagacgccataaaagaacgggcatgttcataaatgtgaaggatagaatctaaatcttttaaagtagcaattctgattttcataagtgcaatttcctttccttgatatattagattttattgtaagtgataagaagaaaaaatgcaaattgaagaaaaaaatagggggggggtaaaaatgatggtagaagctggagaatgtgaaaaaaatatggaaaaattttgaataaaatggatgtaaagtgttgagacaaactgtgctaagaggaataccatgataataccaaacagagggattattaggcttaccatgcctaagtttatacacgtttgggagtataaatataggcacgactagaatttgtagcttagaaaatgaaaggggaaaagtcgtaattgtactgttggggtaaaacttattaattaagagaatgtttaggaggaaagaaacatgtataggaaaaagttaatgcgcgcatgcttaacaggacttatggttgtgactgttgcaacagcaaatgtagcgccagtatttgcagctgaagcaccagcaggaacagagacgacaacctcaaaagcatctgttgtaaaagcacagtttgtagatgcagcaggaacagtcgtagcaggtggagactactttgtagatgcagatggagatggagttttcaatgtgagtgaacttccagtaccagaaggatacaaagcagagacagttggagatttctttacaaaagattacgcagacacagcactccaggtaacggttgacaaaattgcaaaagcatctattattaacgtacagttcatggacggaaataaagtcgtagcaggtggagactattttgtagatgcagatggagatggaatttttaatcttagtgaacttccggtgccagaaggatatgaattgtctttggcaggtgatcagttcgtaaaagattatgtaggaaaaacaacacagttgaaagtgaaagcggtaaaggctgcaactatgaaggtggtgtacaaagatcagacaacacaggaagtagttggagaagaaacattaacaggttcacgtcaggatgcagatggaaattatgtatttgatgcagcagttgattttaatattccatttggataccagctggcagtagattatcctgtagagacattgaaagcgggagaaactaaaacaacagaatgtctggtaacagcaagagaaactgttcttcatattacatttgaaacacaggatggagaagtagtaggaacaaagacagtatctacaacatctcagggagcagacggagagtgttggacattcatgctgggaacagattttgaccttccagaaggatataaactggcagaaggagtggatcagatcacaaacatccaaattccatttggatccacaggcggatttacaatgattgtagaaaaagaagataaatcttctatcgtaaaagcacagtttgtagatgaagcaggtgtagtacttgcaggcggagactattttgtagatgtagacggagatggaatcttcaatcatacagaagtattagagtgggtaccggaaggatatgagctggcaacacttggagatttccaggtagagttttataaagaaactccattgcagtttagtgtgacaaagattgcagaagagccagagaaaccagatccggaagatccaaacaaaccagagaaaccagaagatcctgacaaagaagatacaggaaaagaagacacaaataaaaaagacgacaaaaaagaggatactaagaaagaagataagaagaaaacttctccaaagactggagatgagacaagtgcagcaactgcagcattacctgtaggtgtgagccttgcagcaattcttgcagtattagtgaaaaaatttaaataatctgaaaaacgcatagacggatttaggttataaaaaatggaaatattgccaaaaatgcattgcgtttttggcaatatttttctatggggagtacatgaaagatagggggataagccaagtggcgaaaggaacaaggattacaatgagaaaatacataaaattggtattgatgatatgtatattgggaattctgacatgtggatgtgggaaaaaagataaggaagaaaaaacagtaccgttgacgatatatgaacagctgaaagttacagaggagtcccttccagatgaagaaacaaaagtaatacaaaaaggtgtcaatagttgggcaaaagcatttttggcggtaaatagtgatgctcaagataaagaaataacagatcagagtttgtatcaaagtattgcaaatacagaacatagaagattattaaaagaagaaagagatgctttttataaagaaagcgtggttaatatcaatgaagtgtctacacaagtaaaaagtgcaaagaaagcgcaatatggtaaaacagatgtaggtgttgtggaatgtgatatagatgtgaaaggcacaagaaatgaccaggcatttgaaaagatatatactatgcagatggtagtcaattatcagacaaatgttgtatcagtgtatgaggttgaggatattacgtgggaataagaaataccggtaaagggatatcagttttggagagatatcaggttaccggtatttttttatgacaaagaatataaaaaatgcagcaatttttcatagaatattggaaagtattgacaaaaaaaggattcgaatatacactagaagtgtttaggtagcaaacgttacggaaatttgaaatggtttgttatttaaggggaaactaaaagttataataggaggaaagtagtatgtacaggaaaaaattaatgcgcgtatgcctgacgggtgttatggttgtttcaattgcaacagcgaacgttgcaccagtgtttgcagcagagccagtggaaaaggtggagacggagagcgatagttgggatagtatttctggtgaaattaattttagagatacagacaacaatgaatctatctttgtgcaatttaacaatgaaaaagtggaggattatcgttggggtgatgatccgaaagatacatatgaagtattgccggcagaaactgtgaaaaaatatcttccagaaggatatgaattggtagaaggtatctattcggtagcaggtggagagacacaggattcttattttgtatatgccgaggtaaagaaagtacttgtcgaagaaacacaggatgtgaaaatcaattattatgatgaagcagcaggaaaacaggtagcagaagtgccggtacaggtatcaattgatacatcgtgtgtaaatatggcaatcctgacaagatatcttccagaaggatatacaatcgaaggtacagactgtatcatcagagacggatacgtatatgtttctgtaaagaaagatgtggagatcagagaagcagtgtttcacattacatttgaaactccgaacggagaagttgttacaacagaaacagtaacagcagaaggcgctgatggagaagacgcggtattcagacttggtgtagacttcgatcttccaacaggatacaagctgtccaacgacagagatcaggtaacagaaatcaaaattccatttggatccacaggcggacatacaatggttgtagagaaaggtgacctttcttccatcgtaaaaatccagtttgtagatgctgagaataatgatgaagtggtagcaggtggagattactttgttgatggagacggagacggaatcttccacacaagagagatcacagagtgggtaccggaaggatatgagttacaggaagttggagatttccaggtagagctgtacaaagagacaccattacagctgagtgtaacaaagatcaaagaggataaaccagaaactccggatccagaggagccaaacaaaccggaaaaaccagagactccagatcaggagaaaccagaaaaaccaaataaagaagacgataaaaaagaagacaaaaaagacgagaagaagaattctccaaaaacaggagatgagacaaatgcagcagctgcagcattaccggcaggtgtcagtcttgcagcaatccttgcagtattagtaaaaaaattcaaataatctgaaaaacgaatagacggttttcggttataagaaatgagaatattgccaaaaatgcatcgcatttttggcaatatttttttgaaattttcagattgtactaaatcaaatacaaacgagaatcattcctgttttctcttgtctttcttttaacataatggtatactaaagcttgtaagaaagagaaaattattcatgtacattgaaggaggattttaaacgatggcacagtttgaacagtggtcaggatttaacggaagactctggaaagaggaagttaacgttcgtgacttcatccagaacaactacacaccatatgaaggtgatgaatctttcctggttggacctacagaggcaactgacaaattatggggagagcttcagaaactgcagaaagaagagcgtgcaaaaggcggcgttctggatatggagacagaagtagtttctggactgacagcatatggcccgggatatattaacgaagaaatgaaagatttagagcaggttgttggtcttcagacagacaaaccgctgaagagagcatttatgccatacggtggtattaaaatggctgagcaggcttgtacaacatacggatatgagccaagcccgaaactgcacgagatcttcacaaaatatcataaaacacacaatcagggagtattcgatatctacacacctgagatgaaaaaagcccgtcacagcaagatcatcacaggacttccggacacatacggaagaggacgtatcgtaggtgactaccgtcgtgtagctctttacggaatcgattacctgatcgagcagaaacagaatgattttatcgagggtgaaagacacggaatgaaaggaacagatttccgtcttcgtgaagaaatcgctgatcagattaaagcattaaaagaaatgaaagaaatggcagctgtttacggatttgatatttccaaaccagctacaaatgcaaaagaagctgtacagtggctgtacttcggataccttgcagcaatcaagactcagaacggtgctgcgatgagtgttggacgtatttctacattccttgacatttatattgaaagagacttaaagaacggaacattgacagagtcagaggctcaggagctgatcgaccacatcgttatgaagttcagaatggttaaattcgccagagttccatcttacaacgaactgttctcaggagacccggtatgggctacactggaaatgggtggtatcggaatggacggacgttctatggttacaaagagcgactatcgtttccttcacacactggagaacatgggaccttcaccagagccgaacctgacagtattatattcttctaatctgccagagaacttcaagaaatattcttcttatatttctatcaagacaagttctgtacagtacgagaacgatgatgtaatgcgtccggtatggggagatgactattctatctgctgctgcgtatctgcaacacagacaggaaaagagatccagttctttggagcacgtgcaaaccttgcaaaatgtctgctttacgcaatcaatggtggtgttgatgagaagacaaaaacacaggttgctccaaaatacagcccaatcacatcagagtaccttgactatgatgaagtaatggacaaatatgaccagatgatggaatggctgtctaaactgtatgtagatacattgaacatgattcactacatgcacgacaaatactactatgaagcagcagagatggctctgatcgatacaaatgtaagacgtacattcgccacaggtatcgctggattctctcacgtagtagactctttaagtgcgatcaaatatgcaaaagttaaagtaatccgtgacgaaaacggacttgctgttgactacgagacagagggagacttcccaagatacggtaacgatgatgaccgtgctgacgagattgctgtatggctgttaagaacattcatgagcaaactgaaaaaatgccacacatacagagactctgagccaacaacatctatccttacaattacatctaacgttgtatatggtaaggctacaggatctcttccagacggaagaaaagctggggaaccactttcaccaggagcaaacccatcttacggtgcagagcagaatggtctgttagcttctctgaactcagttgcaaaacttccatacgaagaagcactggacggaatttctaatacacagacaatcagccctggagcacttggacatgatgacgatgagagaaaagtaaatctggctaacgtaatggacggatactttgatcagggagcacatcacctgaacgtaaacgtattcggaacagagaaactcatcgatgctatggagcacccagagaaagaagaatatgcaaacttcacaatccgtgtatcaggatacgctgttaaattcatcgacctgacacgtgagcagcagttagacgtaattgcaagaacatgccataaagcactgtaatttgtaattcacagggacgtagtacaaacaggatgctacgtccctttttaaatatcaagagaaagggaatcaagcaaatgaaaggatatatacactcaacagagagttttggatccgtagacggaccgggagtccgttttcttatttttgtgagcggatgtccaatgcgctgtcagttctgccataatccggatacatggagtatgaagacaggaacgcagatgtcagcagatgaattgttggacaaagcatggaaataccgcagttattggggaaaatccggtggaattacagtcagcggaggcgagccgcttttgcagatcgactttttattggaattgtttaagaaagcaaaagaaaaaggaatccacacaacaatcgatacaagtggagcaccttttacaagagaagaaccgttttttagtaagtttgaggaactgatgaaatatacagatctgcttcttttggatatcaaacatattgacgatgagcagcacaagattttgactggtcatacgaatcagaatattctggatttggcgagatatttaagtgacatcaataaaccggtgtggattcgtcacgtactggttccggagagaagtgataatgatgaatatctgaaaaagctggatgcattcattcagacactctccaatgtagagaaagtggaagtacttccgtaccatacattgggagagtataagtggaaagaactggggatggaatatccgctggaggggatcgagcctcctacagaagagcggatccgcaatgcgaatgaattgcttcatacaggaaaataaaaaagaaatcgctcatcatccgcctgagatgatgagcgatattttttatgcattattctgtttcaacaaatgcgtcttttccaagtccgcacagtggacataaccagtcttccgggatatcttcaaaagctgttccagcctctacaccgttgtctggatcgcctacttcaggatcataaatgtatccacatgcttcacataaatattttttcataaaaatagtcctcctttaatttttaacgaaagcatttaacatatgtattataaccaaaacaaaacgataagtctactaaaaaatagaaatttgtaattaattataataatagtaattgttattgatataagaagagctaataaaataatgaaacagtaacagaatggagtaataggagcatggtaaatagaaaacaatattgacatccatacaggctgtccatataatataattagcagttgtatcaaagggttctggttgttgcaggaccctttcttatattctggagggagaaatttattatgaataaaaaagaagtattagaaatccgtaagcagtttacaccggcaaattgcgcgatcacaagaattgccggctgctatgtggatcatgagaaaaataaaaagatggaatcaaaatcggcatttttatctttgcctgaggaagaggcgtttaaatattttgacatttttaaaaagacactttccgggacgatggggaaaaatatgttgaatatggaattcccgatcgaccaggagatgccaggcgggacacaggaatttttaatgaaactaaaagccagtaagctggaagatgacatgctcctggaagaattttatgacaaagtaatcgctacatatgagtatgcggagaattattatattattttaatccatgcaatgtatgatgtgccgggcagatcgtctgacaatatggagatgtttgacgcatccgatgaagtgtatgagtatttggtgtgcagtatctgtccggtttcgttgtcaaaggcaggattaagttacaatgcagagagcaattgtattcaggatcgtatccgggactgggtggtagatatgccggacaagggatttttgtttccggcttttaatgacagaagcacggatattcatggagtactctattatacgaagaaatcagaggatttgcagccggagttgattgagcagctgctgggagcaaagatgccgatgtcagccaacacgcagaaggagacatttcagatgctgatcgaggatactctgggagaagacggagattatgagacgatccgcaatatccatgatactttgaatgacatgattgaggaacataaagaagaaccggaaccgctgcagttggataagaccgatgtacgcaaggtatttgaaaagagcggcgtttcttcggaaaaaatggagtgttttgatcaaaattatgaagagacagcaggggaaaagacttctcttcttgcaaccaacattacggagacaaaaaagtttcagattgaaacgccggatattgtgattaaagtcaatacggaacgggcggatctgatcgaaacgagagtgatagatggaaggcagtgtctggtcattgctgtagatgattatattgaagttaatggagtaaatgtaaggactctgaagcgcaaaaaaagcacagaagaagaggaataaaatagaacataacgggatttttatctggcggtctcagatgttgatcagagactgcttttttacgaaatgaaaataattaaatatctaactagtttattggcataaatattaaaaaaatgtgaaaaattatattaatgcttgatttttttggaagataatactaatatatcgattagatatctaactaattaaaaaggaggtatagcaatgcgctgtgatctggataaggttccaagtgtcggactctttgggatggtggttcatcagggcgggctgcgggcacagaagatgtttgacaagtatgggctgaataagagtcaggcaggcatcctgtttatgctgcatcatgaggaagctgtttctcaaaagcctctttctcagaaggagctggcaaaaaagctgaatgtgacggcgccgtctattacatctgcgattcagaagatggagaaggctggatttatcaaacgacagccggatgaaaaggatcaaaggatcatgcgtctgtatctggatgaaaagggaaaggcctgcattgaacatgtaaaggaagtggccatgcagatggatgaaatcatgttccgcggcatcagtcaggaagagaagcttcttttgcgaagaattatgattcagatttttgacaacttaaaagaagaaccaaggtttcatacatcgggagaaagcaaaacagagagataaggcaggaaaggagagcgtatgaaaaatctatttaaatttatcggacattactggaaagcggtcatcgcgattgttgcgatactggcagtacaggcttattgtgacctgtcacttccagcttatacatccgatattgtcaacgtgggaatccagcagggcggaattgaagataaagtgccggctgcgatttcagaagaagagtggaataaggtgatgttgtttgtatcacaaaaggaccaggacacggtgaaggatgcatatgaaaaagacgagagttcttatgataagaccgccttcgttttgaaggatttcgtcaaggaagatgagacagcgctgaagaaagtagaagatgttttagcgcttccgatgatggtaacttccggttttgagtccggaagcaagcagactcagaaaatggagaaggaactgaaaaaacagattccaaaggagatgctcacagaagatactacggtgtttgatattttacagatgatgccgcaggaatccagagaggaactggtaaaagagatcaaaaaagaaatgaaagacatgccggatatgattctggagcaggcagcagtaagttatgcaaggaatgcatatcaggatctggatatggatgtagatcagatgcagtatcactatctgtttactacgggcggtaagatgatcgcacttgcgtttcttggaatggcagccagtgttttagtctgttatctggcttcacgggtgggagcaagagtcggacgggatctcagaggaagagtgttccgaaaggtagttggattttccaacaacgaatttgatcatttttcgactgcatcattgattacaaggagtaccaatgatattcagcaggtacagtttttggcagttatggttctgcgaatggtattgtatgcaccgattctcgcgttgggcggtgtttataaggtatttcagaccaatgtttcaatgtcctggatcattgcacttgcggtgattttgatcttttgtgtggtgttggtgctgtttgttgcggcaatgccaaagttcaaaacattgcagaaactggtagacaggctgaatctggtgacaagagaaattctgaccgggctttcagtgattcgagcattcagtacagaaaagcatgaagaagagcggttcgacacagctaacaaaaacctgacgagaacgaatttgtttgttaaccgtgcgatgacatttatgatgccgacgatgattctgatcatgaatggtgtttctgttctgatcgtatggaacggggcacatggaatcagtgacggtcagatgcaggttggagatatgatggcatttattcagtatacgatgcagattattatgggattcctgatgatctgtatgatttcgatcatgcttccaagagcgggagtgtctgcagatcgtattcaggaaattctgacaagtgagacggtgatcgatgatccgaaagaagcaaaggcattctgtaaagaagaagcaggtgtcctgaagtttgatcatgtgtcattccgttatccgggagcagacgaagatgtactccatgatattcattttacggcaaggccgggagagacgacagcgattatcggaagtaccggaagcggaaaatccacactggtcaatctgatcccgcgattttatgatgtgacggaaggaacgatcaccctggatggtgtggatatcagagaagtatcccagcatacgctgcgtgataagattggatatgttccgcagaaaggtgttctgttttccggagatattgcttccaatattttgtttggaaatccggatggaggagaagctgtgatgaaggaagcagcacagatcgcacaggcggaagagtttatcgaagcaaaatcagagaaatatcacagtcatatagcacagggcggttcgaatgtatcaggaggacagaagcagaggctttccattgcaagagcaattgcaaaacgtccagaattgtttatttttgatgacagcttttcggcgcttgactataagacagatgttgcacttagaaaagcgttgaagaaaaagactgcacagagcacggtgctgatcgtagcacagcgtatcagcacaatccttcatgcagagcagattattgtattagatgaaggaaagatcgccggaatcggaacgcatagagaacttttggattcgtgtgaagtgtatcgtcagattgcggcttcacagctttctgaggaagagttagatttgaacggaaagggggcagaggcaaatgcctagacatggacatatggggccgggcggcgccaatgagaaagcaaaagactttaagggaacgctgaaaaagcttcttcattatatgagtgtctttaaagtacagatggcatttattgtgatttttgcaatctgtggaaccgtttttgatattgtaggaccgaagattttaggaaaggccacaacagagatttataatggtctggtcagtaaagtgtcaggcggcagtggaatggactttgggagaattgggcagattcttctgatgacattgggattatatctgatcagcgcattgtgttcgtttatccagggctatctgatgacgggagtttcccagaaaacaacataccgtttgcgtaaggagatttccgagaagatcaatcggatgccgatgaattattttgatacaaagccggtcggagaagtactctccagagtgaccaatgatattgatacgctgggacagagtctgaaccagagtgcgacacagatgatcacgtccgtgacaacattgatcggagtactggcaatgatgctttccatcagcccgttgatgacattggcgacgctggtaatcctgccggtctctatgatcctgatttcatttgtgatgaagcattcacagaaatatttccgcggacagcaggaatatctgggaaatgtgaatgggcaggtggaagaaatctacagtggacataatatcatcaaagccttcaataaagaggaagatgtgattcgtgagtttgatacaaccaatgacaggctttatgattccgcatggcgttctcagtttttttccgggatgatgatgccgatcatgcagtttatcggaaatctcggatatgtggtggttgcgattctgggaggatttctggcgatcagaaagacaattgaagtaggagatattcagtcttttattcagtatgtgaaacgttttacacagccgatccagcagatcgcacaggttgcgaacatgctgcagatgacggcggcggcgtccgagagagtgtttgaattcctggaggaagaagaggaagatcagactgtggagcatccggtatcggtagaaaatctggaaggaaatgtaagctttgatcatgttcattttggatacaatgcggataagatcattgtcaatgacttctcagcagaagtaaaagaggggcagaaaattgcaattgtagggccgaccggagcaggaaagacgacgatgatcaagcttctgatgcggttctacgatgtgaacagcggtgccatcaagatcgacggacatgacgtcagggatttcaacagaagtgaactgcgtgagatgttcggaatggtgctgcaggatacctggctgttcaatggaagtatccgggacaatatcaaatacggaaaactggatgcaacggatgaagaagtgatccaggcagccaaggcagctcatgtgcatcagtttgtgaagacacttccgggcggatatgatatggaactgaatgaagaagcaaacaatgtgtctcagggacagaaacagctgttgacgatcgcgagggcaattctggcagatccgaagatcctgattctggatgaggcgacaagttctgtagatacaaggacagaggtattgatccagaaggccatggataacctgatgaagggacgtaccagctttgtaatcgctcatcgtctgtcaacgatccgggatgcagatatgatccttgttatgaaagacggagatatcgtagagcagggaaatcacgaagaacttctggcaaaaggcggattctatgcggatctgtataactcacagtttgagaaaacaacggaggtggcataatataagaaccggcaggagaggagactttcctgtcggttttgtgtttcgtgaaaaaatatgttatactaaaaaatatgacaaaaaagggggcaaaagagtatgccgttgacacattttgatgcggagggaaaagcccgcatggtagacgtgacagagaaaaaagagacggtaagagaagcaacagcaaccggaaagatcaaagtcagtcgggacgtgtatgatgcgattgaagccggaacggtcggaaaaggcgatgtgctttctgtagcgaccacagccgggatcatgggtgtgaaacggacggcggatctgattccgatgtgtcatatcctgccgatcacgaactgtaagatccgttttgaaaaggatccaaaaaatctggagatcacctgtttttgtacggtaaaagtgaccggaaagaccggagtggagatggaggcgctgacaggtgtcagtgtggtgcttctgacgatttatgatatgtgtaaggctttggataaatttatggagatacaggatatttatctttgtaaaaagaccggaggaaagagcggagaaatcgtaaatccgagaatggaagacagaggagaagagggaagatgaaggcagcagttgtgacattgagcgacaggggattccgaaacgaacgggaagataaaagcggagagctggtacagatgatgttgaaagaagccggatatgaagtggcggaatacaggttacttccggatgagcaggcgcagattgagacggtattaaaagagttgagtgatgagaaagagatggatctgatcctcacgacaggaggaaccgggttttcgcaaagagactgtacaccggaagcaacgctgaatgtagctaccagaaatgcgccggggattgcagaagcaatgcggtatgcgtcactggctattacccccagagcgatgttgagccgcggggcatcggtgattcgaaatcagacactgatcattaaccttccgggcagtccgaaagcggtgaaagaaaatctggagtatattttgcctacactgtcacatggactggaaattttaaaaggagtgacaggagaatgcgggatcagtttgaaagaaacataaattatatgagagtgtctgtcacagaccgatgtaatctgcgctgcgtgtattgcatgccaaaagatggcgttcagcagatttctcacgatgagatccttacgtttgatgagatcgcaagggtgtgccggatcggggcagaacttgggatttccaggatcaagctgacaggcggcgaaccgctggtgcgaaaggggattgaagatcttgcagagatgatctgccggattccgggaatcgagcaggtgacgctgacgacaaacggaatcctgttaaaagacaaattgcctgcactcaaaaaggctggaatttctgcggttaacatcagtctcgatacgatggacagagcgcagtaccaggaattgacaggaaaggactgtttgttgcaggtaacggaaggcattcgggcggcactggagcaggggatgcgtgtgaaaataaactgcgtggcgctgaatgaatgtaatgagtttcagtggggaaagcttgcagcattggcaaaagagtatccgctggatgtgcgttttattgaaatgatgccgatcggtcttggaaaagcttatcagggaagtatgcaggaagtgatacagaagaacctggaaaacatatatggtgcagcaaagccggattcaggggcagtgcgtggaaatggtccggcagtatactgggagtttcctgggtttcagggaaagattggatttatcagtgcgatctcccataagttctgcaaagactgcaaccggattcggatgacggctgaaggttttgtgaagccctgtctgcagttcgcacagggagtggatatgagatcccttttaagagggcagacggatgatgaagaactgaagcaggtattcgagcagttgatttatgaaaagccgcgctgccatcagtttgaaacagaaaaagcggacgaaagtctcgaacagcgcgagatgtcaaaaatcggaggataggttgaaatgggaattgtaagagcagtgtgtacgagcccggcaaagggaacgcagaagacgaacgtgaaaagtgcggaatttatagaagattttggaatcaaagaggatgcccatgcgggaaagtggcatcgtcagatcagtcttctttcctatgaaaagatcgaggcgtttcgggcaagaggagcagaggttgcagatggtgcatttggagaaaatctggtggtagagggatttgactttaaaaatcttccggtgggaactaggtttcagtgcaacgaagttattttagagatgacacagattggaaaggaatgtcatcacggatgtgagatttttcagaagatgggagactgtatcatgccaagggaaggtgtatttgcaagggtcatccacggcggacggatttcctgcggggatgagatgtacatgttgggtcaaggtgagcagtaaccatttcgatatgaagtgagagaagattttcttgcagaaataaaggaaacgtaatatagtgtaaaaagcaaaagtaaacggaggaacaaacatgaaatggaataaatttcgtctgacaacaacaacagaggcggaggatattgtcagcagtatgcttatggatctgggaatccagggggtcgagattgaagataaagttccgctgacacagtcggataaagagcagatgttcgttgatatcctgccggagacagaggcagatgacggtgtggcatacctgagtttttatctggaggaggatgaagataaagagaaggtacttgctgatgtgcgtgcagaattacaggatatggcatcctatttgaacgtgggtgcgtgtacgatcgaagagtctcagacagaggatgtggactgggtaaataactggaagcagtattttcatcagttctatgtggatgacattctgatcatcccatcctgggaggaagtaaagccggaagacagtgataaaatggtgatccatattgatccggggactgcattcggaacaggaatgcatgagacaacccagctttgtatccggcagatccgcaaatatacaacgccggagacaacaatccttgatgtgggatgcggaagcggtattctgggaatgctggctttgaaattcggcgcaaaatattccgtcggaacagatctggatccatgtgcaatcgaggcaacttatgagaacatggaagtcaacggaatcagtaaagagatgtacgaagtgatgatcggaaatatcattgatgacaaagacgtgcaggacaaagttggttatggaaaatatgacattgtcgttgcaaatattctggcagatgttttggtcgcactgacaccggtgatcgtggatcagctcaaagacggtggaatctacatcaccagcggaattattgatgacaaagaagagacagtggtagaggcagttaaagcagcaggtctggaagtcctggaagtgacgtatcagggcgagtgggtttctgtgacggcgagaaagaacggataaggaaggattaagatccatgcagaatttttttgtatatgactctcaggtgcagggggaaaacatttatatagagggaaccgatgtaaaccacatcgtacatgttcttcgtatgaaggttggagaggaagtcagtgtacacgatgatgtgaaccggaaatacctgtgccggatcgagaaactgctggaagaaagagtggtgctttcgattgtggagcagcaggaatcggacacggaactttcctgcccgatctatctgttccagggtcttccaaagggagataagatggaatggatcattcagaagtgcgtagagcttggagtacacgcaatcgtgccggttgcgacgaagcgggcggttgtaaagctggacgagaagaaagcgcagaaaaaagtgaacagatggaatgccatcgcagagagtgcggcgaagcagtccggaagagggatcgttccggaagtacttccggtgatgaaatggaaggaggcgctggaatacgcgcgtcagctggatgttaagatgatcccttatgagaaggcagcagggataaacgcgacaaagcagctgatcggctctgtttcttttggacagtcagtcgggatttttatcggtccggaaggcggctttgaagaggcagaagtggaagctgcaaaagcgatgggagcagtcccggtgactctgggaaaaaggatcttacgaacagagacggccggaatgacgatcctgtcaattctgatgtatcatctggaaagagagtaacatagtttaatattgagaagaagtgaaaaggaaggtatcatggaagtatatttggacaattcggcgactaccagatgttacacagaggtgggagaactggtatataaagtgatgtgtcaggactatggaaatccgtcttccatgcaccgtaaaggtgtggatgcggagcattatatcaaggatgcaaaagaaattctggcaaaaattctgaaggtcaatgcaaaagaaatttattttacgtccggcggtacagaaagtgacaatctggcgatcattggaacagcaaaagcaaacaaaagaagaggaaatcatctgatcacatcatctattgagcatccggcgattttgaatacgatgcgttatctggaagaggaagaaggctttcgtgtgacctatcttccggtggacagcatgggacgcatcaagctggaagctctgaaagaggcgttgtgtgacgagacaattctggtttccgtcatgtatgtgaataacgaagtaggagcagtgcagccgatcgatgaagctgtccggatcgtgaaggaatataatccggatattctgttccattcggatgccgtacagggattcggaaagtataagatttatccgaagcgtcagaagatcgatctgctgacaggaagcggacataagatccacggaccgaaaggaactggatttttatatgtcagtgagaaagttaagatcaaaccaatcgtgtttggcggagaacagcagaaaaatgtccgttccggtacagagaacgttccggggattgcaggactcgggttagcggcaaagatgatctaccatgatctggatatgaagactgcactgatgcgggaactcaaagagtattttattgaaggaatcgcgaagattgaaaatacaaccgttcacgggatgaccgatgaaaacagtgcaccgcatatcatcagtgtgggatttgcagggattcgaagtgaagtgcttctgcatacgctggaagagaaaggaatttacgtatcctcaggttctgcatgtgcgtccaaccatccggcaatcagcggggtgttaaagggcatcggagccggaaaagagtatctggatgcgacgatccgtttcagcatgtctgaatttacaaccagagaagaaattgactatacattggaaacgctatataattgtgtaccgatgctgagaagatatacaagacattgatgcttgataaagagtccaaaagaaaaggataaataaaggagaatatcatgagatttcattcatttttgattaaatacggagaaatcgggatcaaaggaaagaaccggtatctgtttgaagacgctctggtgcgtcagatccgttttgcattgaaggatgtggacggagaatttaatgtacacaaagcacaggggagagtgtatgtggactgtgaaggcgaatacgattacgaagagactgtggaaagtttgaaacgagtgtttggtatcgtaggaatctgcccggttgtgcgtctgcaggacaatggatttgaacagctgaaaaaagatgtggaaaaatatatcggagaagtgtaccctgagaaaaaccagacatttaagattgaagcaagaagaagcagaaagtcttatccgttgaattctatggaattgaactgtgagttgggcggtgtgatcctggatgcgtacccggagatgaaagtagacgtacacaatccgcagattcgtctgaatgtggaagtacgggaagagatttatctgtactcagagattattccggggccgggcggaatgccggtaggaactaacggaagtgccatgctcctgctctccggtggtatcgacagcccggttgccggatatatgatcgcaaaacgcggtgtcgctctggaagcaacgtatttccatgcaccaccgtatacgagtgaacgtgcaaaagaaaaagtggtggatctggcaagactggtttccaggtattccggcccgatcaagctcaacgtagtcaactttacagacattcagctgtatatctatgagaagtgtccgcatgaagaactgacgattattatgcgaagatacatgatgaagatcgcggagcattttgcaaaacaggatggctgcctgggactgatcaccggagaaagtatcggacaggttgcgagccagacgatgcagagccttatggcaaccaatgcagcatgtacgcttccggtctaccgtccgctgattggatttgataaaaaagaaatcgtggatatttctgaaaagattgatacgtacgagacatcgatccagccgtatgaagactgctgtacgatttttgttgccaagcatccggtgacaaaaccgaatctggagcgtattgagaaatccgagagaaatctggatgagaagattgatgagctgatgcagacagcaatcgatacggttgaaacgatcatggtaaaataggacaataaaaaggctgcctcataaagagacagcctaaaaataaatgattccattatttgatgatgtaagaatccagtgcagctaagatgtcatccagattagaatcagcgtggatattcagatcgatcggtttagaaagatccaaactgaaaattcccataattgatttggcatctatcacatatcttccggacactaaatcaaaatcgttgtcatattttgtgatttcgtttacaaatgattttactttgtcgattgagtttaaagaaatctgtactgttttcattataaaagtccctccttgatatacaatgcttcgagtatctgtactctaggtatattctacgagaagtaactgcaaaagtcaaggaacaaacaggaaaaacaaggaaaaccaggagaatatttttatgaaaaaagtcgcgttacacaatctgggatgtaaggtaaatgcatatgagacagaagccatgcaggaaatgctggaacatgccggatatgagatcgttccgtttcaggaaggagcggacatttatgtgatcaatacatgcacagtgaccaatattgcggaccgcaaatcaagacagatgctgcatcgggcaagaaagatgaatccggatgctgttgtggtcgcagccggctgttatgtgcaggcacaggctgaaaagcaggtgatcgatccatgtattgatattgtactcggaaacaataaaaagcaggatcttctgacagcgctgcaggcatatgaagaagcacacggtgatttgcgggaagtgatcgatatcaatcatacaaaagaatatgagaatctgcatctgacaaaacagggggagcatacgagagcatatatcaaggtgcaggatggctgcaaccagttttgttcttactgtattatcccgtatgcgagaggaagagtcagaagcagggcaaaagaagatgtagtagcagaagtgacagatctggcgaaaaacggataccaggaagtcgtgctgacgggaattcatctgagctcctatggcattgattttgaaaatgaagacaatctgctcagtctgattcgtgcagtgcatgagattgaaggaatcaaaaggattcgtctgggatctctggaaccaaggatcatcacagaagagtttgtacaggcgatcgcagcgcttccgaagatgtgcccgcacttccatctgtcattgcagagtggctgcaatgaaaccttaaagaggatgaaccgcagatatacaagtgaagagttttatgaaaagtgtgaaatattgagaaagtattttgaaaaaccggcgctgacaacagatgtgatcgtgggatttccgcaggaaacagaggaagaatttgaaacaacgtatgaatttctgaaaaagatctgcttctatgagactcatattttcaaatattccaaacgagaaggcacgaaagcggcagtgatgcagggacagatcccggagcagatcaaggcaaaaagaagcgccagactgatcgaactgggggagaaaaaccgcagagcatatgaagaatcgttccttggaaaaacagtggaagtgctggtggaagaaaaatcggatgtgaacggaaaagaaatgtggacagggcacacaaaagagtatatgaaaattgcactagagtcagagaaaaatcttcagaattgtattctaaacgtgcaaattaaagatggccgggaaattattcattgaattttaaaatagattatattagaatgataagtaggatactaacgcaattatgctgattccggggaatcagatctgcgcgtgaataaaagaaaaatggaggagatacgatgagcgatttgagtaatacacagttctttcaggtagaaccgggaccacagatttctgcaaaagatattctggaaatcgtgtataaggcactgaaagaaaaaggatacaacccggttaaccagatcgtgggatacattatgtcaggagatcctacttacattaccagctataatggagcaagaagcctgattatgaaggtggaaagggatgaattggtcgaagaactgttaaaagcgtatatcgagcataattcatgggaataatcgactatgcggatcatgggactggattatggcacgaagactgtaggggttgcgatcagcgacgctcttggtctgactgcgcaggggatagagaccattcagagaaaagaggaaaacaagctgcgccgtacactcgcccggattgaagagctggtaagggaatatgaagtggatacgatcgtgcttggttttccgaagcatatgaataacgatgtgggtgaacgtgcaaaaaagtctctggaattcaaagagatgctggtgcgcaggacaggacttgatgtggtgatgtgggacgagcggcttactaccgtggaggcagagcgtacattgatcgagagtcaggtgcggcgcgagaacagaaagcagtatattgacaagatcgcagctgtttttatcctgcagggatatctggattcgatttatttgaaaaagaaagccgaagaggaaaactagaagctgcccacaggaggaagaacgcatggaaaagattaagttttgttttgacgagtcgggagacagcgttgaattttttgtactggaacagacaaagatcaacggggcatcctatattcttgtgacagattcacaggaggatgacgcccagtgtctgatcttaaaagaaggtgaatctcaggacgcgaaagagagtgtctatgagatcgtagaggacgacgtagaattacaggcggtttccaaagtatttgaggaactgctggaagatgtagagattgaaatgtaacttagaatattactttaccgcaggggacgtggaggatgacagtagaacaggaaaaagtacaggggatgctcaaggaaaagctcagagaaaaaggctggaaagtgaccagacagagactttctattttgcagaccctggcagaacataaagggcagcatctggcggcggaagatatttttgagctgatgaaggatgaatatccggaaatggggcttgcgaccgtgtaccgtacgctgcagcttttgtatgagattcagctgatcgaccggattcatttcaatgatggatgtatccggtatgagatcggtcatatatttgacggagactccaaacacagtcatcatcatctgatctgcagaacatgtgggcgtgtgatgccgtttgaagatgattttctggaggatctggaggcacagatcgaagccgataccggttttcatgtgttggatcatgaactgaaattttatggtcagtgtaaggaatgtgccgaagcttccatgcggaaagagaatacataaaaaactcatggaggtgtatatttttgaaaaaagaaaatcgtggaaaattaaaaatcattcctttgggaggtcttgagcagatcggtatgaatattactgctttcgaatatgaagacagtatcattgtggtagactgcgggcttgcattcccggaggatgacatgctcggaatcgatctggtcattccggatgtgacttatctgaaggataatatatccaaagtaaaaggatttgtaatcacccatggtcatgaagatcatatcggagctttgccgtatgtacttaaggagatcaatcttccaatctatactacaaagctgacaatgggaatcatcgagaacaagttaaaagagcataatctgctccgtacgacaaagagaaaagtggtgcgtcatggacagtccatcaatcttggacagttccgaattgaatttatcaagacgaaccacagtattcaggatgcttccgcactggcgatctattcaccggcaggaactgttgtgcataccggagacttcaaggtggattatacaccggtattcggagatgccattgatctgcagcgttttgcggagatcggaaagaaaggtgtgctggctctgatgtcagacagcacgaatgcagagcggaaaggatttacccagtcagagcgtacggtgggaattacgtttgatcatatttttgcagagcatcagaacacaagaatcatcatcgcgacatttgcatcgaacgtagaccgtgtgcagcagatcatcaactctgcgtataagtacggaagaaaagttgtggtagaaggacgcagcatggtaaatatcatcacgacagcatctgagcttgggtatctgaatgtgccggagaatacactgatcgagatcgatcagttgaagaactatccaccggagaagaccgttctgatcacaacaggaagccagggagaatccatggctgcactttccagaatggcaggggatgtacaccgtaaagtgacgattcagccgaatgacacgatcattttcagttcgaatccgattcctggaaatgagaaggcagtatcccgtgtgatcaatgagctttctgcaaagggtgcgaacgtgatattccaggatgcgcatgtttccggacatgcctgtcaggaagagttaaagctgatctattcgctggtaaaaccaaagtatgccattccggtgcatggtgagtaccgccacttaaaagcaaatgcggagatcgcgcagtctctgggaattccgaaagagaatatctttatcatccagagcggagatgtgatcgagctgagtgatgcagaagcaaaaatagtggataaagtccatacaggagcgattctggtagatggtctgggtgtcggtgatgtcggaaatatcgtattgcgagacagacagcatctggcagaggacggaattctgatcgttgttctgacactggaaaaaggcagcaacaatctgctggcaggaccggatatcgtatccagaggatttgtctatgtaagagaatccgaaggactgatggaagaagccagaaaggttgtgacagacagtctggataaatgtctttccggaagacatgcggactggaataagatcaagatgacgatccgtgacacaatgaacgattttatctggaagaagacaaagagaagaccaatggtcattccgattattatggatgtgtaagatatgatagtagatgaacgtatcgtgacattcatcaattccttagagacagagaacagtgaaatactcgaagcagtggaacaggaagctctgagcacatatgtgccgatcatacgaaaagaaatgcagagtttcctgaaagtgcttctgatgatacaaaaacctatgtgcatcctggaagtagggaccgcagtaggtttctctgcgttattgatgagtgaagcggcaccagaagggtgcaggatcacaacaattgaaaattacgaaaagagaattccgatcgccagggagaatttcagacgggcagggaaagaagagcagatcacgctcatagagggagatgctatggatgtgctgaaaacactggagggcagctttgattttatttttatggatgctgcaaagggacagtatatccggtatatgccccaggtgctgcgtttgcttcgtccgggcggaactcttgtgacagataatgtactgcaggatggggatattatcgaatcccgttttgcggtggaacggagaaaccgaacgattcattccagaatgcgggagtatctgtacgaattaaaacaccatgaactgctgacaacgtccattattccgcttggggatggagtggctgtcagtgtgaagaaacaggaaggagaataaaatggcaagacatcctgaacttttgataccggcaagcagcctggaagtattaaagacagcagtcatttttggagcagatgcggtttatatcggaggagaggcatttggactccgtgcaaaagcgaagaacttttccatggaggacatgaaagaaggaatcgcatttgcgcatgaacatgatgtgaaagtgtatgtaacagccaatatcctggcacacaatgaggatctgccgggagtgcgtaaatattttgaggaactcaaggaaatcaagccggatgctcttattattgcggatccgggagtgtttgagatcgcaaaagaagtgtgccctgagattgagagacacatcagtactcaggcaaacaatacaaactatggaacctataatttctggtataaacaaggcgcgagccgcgtggtttccgccagagagctgtctctggaagaaatcaaagagctgcgcgcgaatattccggaggatctggaaatcgagacatttgtacatggagcgatgtgtatttcttattccggaagatgccttctgagcaactatttcacaggcagagatgcaaacaggggggcatgtacccacccgtgccgctggaaatatgcggttgtggaggagaagagaccgggagagtatctgccggtttatgagaatgaaagaggaacttatattttcaactccaaggatctgtgcatgatccagtatatcccggagattctggacgcgggtattgacagtctgaaaatcgaaggacgcatgaaaaccgcgctctatgtggcaacagttgcaagaacctacagaaaggcgatcgatgactatcagaaggatccggaattatataaaaagaatatgccgtggtatctggagcagatctccaattgtacgtaccgccagtttacgacaggattcttctttggaaaaccggatgagacaacacagatctatgacagcaatacgtatgtgaaagagtatacctatctcggaattatcggagaggtcagggacggtctgtgccggatcgaacagcgcaacaagttttctgtgggtgagatcattgagatcatgaagccgaacggggaaaatgtggaagcgaaagtagagcgtatcctcaatgaagaaggagaggagcaggagagtgctcctcactcaaaacaggtgttatatgtggcgctggatcagaaggcggacaaatatgatatcttacgaagagcagaaaaagacgcgtagcttttcgaccgcgctcttttctatccgggatacataagaacgggagatccccagttgtttggcgacttccctctgcgtgtattcctcgccgccataaagtccataccgcatttttaaaacgagtttttcccgctgggagagctcgttttctactttttcatacagcttctggatattttctttcaggcatacccgttccgggatgtcgtcttcatccgtttcgataatatcgtataatttgatctcgtttccttcccggtccgtaccgatgggttcatataaagaaatctcttttgacgtctttttccgtgcgcgcaaatgcatcaggatttcgttttccacacacttggaggcataagctgccagccggtttcctttgcttggattaaaggtgacaatggctttgatcaaaccgatggttccgattgagatcagatcttcgggatcttcgtccacatactgatattttttgatcacatgtgcaacgagccgcagattccgttcaatcagaatgtgttttgcctgcaggtcaccctcagtatatttttgaatatattctttttcttcggaaggggtgaggggatttggaaatgatttcaagacagcacctcaaagcacatttgataacagtgtatgtaaagaaggcatgatttgtgcttttccacttgaaaagaggacgggcagaaaaaagtggttgacaaacagcgggcaggagagatatagtaagactacattcccggagcgatccgctctggagagtataagatctattgattcaaaaggccgtatcggccagcgttttcaagttacaaatttattagaagatcagttatgtggggactgaacgtacaggctcttggaaaaggagtgtgtgatgagtttttgctcagtattatctgcagcagtgatcgggctgcgggtagaatttattcatgtggaagctgacgtcagcaacgggcttccggtatttcatatggtgggatacctttcttctgaagtgaaggaggctgcagagcgtgtgcgcacagcaatccgaaacagtggagtttcgtttccagccaaacggacgatcgtcaatctggcgccggcaaatgtaagaaagagaggagcgtcgtttgatcttcccattgcagtggcagtgatgattgcattgggatgtcagatttcagaggggataaggcatacgctttttataggagaactgggactggatggcagtgtgctggaagtacctggtgttctgccgatcgttctggaggcaaaaaaggcgggagtgaaacgctgcattgtaccagaagcaaatgaggcggaaggcgcacttgtgaaaggaatcgagatcattggggtaaagcatcttaagcagattacaaagattctttcaggagagagaaaaaaagaaaaaacaaggaatcaaacaaaaaagcagacggtaaaaaatccgcagccggatttttctgaaatgcagggccaggcagccgtcaagcgtgcagcggagattgcagtggcaggcggacataatcttcttttgatcggaccgccgggaagcggaaagaccatggcagcggaacggattgccggaattctgccgcctctgacattagaagagagcatggagattacaaaaatatacagtattatgggactgcttgatgagaaagaaccgctgatccagagccggccttttcgcagtgtacaccatacggtcacaagggcagcactggctggaggcgggatgatcccgacgccgggagagatcacactcgcacacggcggtgttttgtttttggatgaattgccggagttttcgaaaagtgtgatcgaggtactgagacagccgcttgaagagcaccagatgcggattgcgagaacacacggaaattatgtatttccagcggattttattttgatcgcggcgatgaatccatgtccctgcggatgctatccggatatgcagaaatgtacctgtacgcctgtgcagattcagaattatttaggaaggatcagtcagccgtttctggatcgaatcgatctgtgtgtagaggcgccccgggtggaatatgactcactggtggagaagaaagcacaggaatcttcggaagcaatccggcagagagtatgtgaagtgcgaaatctgcagagaatgcgttatggaggaacaaaggtaaatgcaagactggacagccgggagacagaagaattctgccgtctgggagagccggaaaacgaagtgatgaagcaggcatttgctgcctttggatttacagcacgtacttatcataaagtgttaaaggtggcgagaacgatcgcagatctggacggaagtcaggaaattctaaagcagcatttgtgtgaggcaatcggctatcggacgccggataagaagtactggaaacgataggaggaagagcgcatgaagtatgaatactggttttccggaatccgaaatattccggatcggacaaaaataaaattaaaagaaaaagcagggacagcagaagccatttattatatagaagaaactgcactcagaaagatgcagctgctcaaggaacaggaaatttggaagctgctggaggcgaaaaagaaagaggagctggacagaaattatgaagcaatgagacaaaaaggaatctcggtgatcccgtggggagaaaaggaatatccaggtcgtttaaaagaaatctatgatccgccgtatgcgttgtatgtgaaaggaaagctgccggataatactgcgcgtgcggcagccattgtgggagcgagaagttgtactccctatggagaaaaatatgcgctggaatatgggaaaaaactggcggaatgtggaattcaggtgatcagcggacttgcgcgcggcgtagacgggatcggacagagaggtgctctgctgggaggtggaaagacctttgctgttttggggagcggggtagatgtctgttatccgaaaaaccatatgggattatatctggatatcctggagcaggaaggcgggatcctttcagaactcccgcccggcacaccgccgcttccgcagcattttccgaggcgaaaccggatcatcagcgcgctgtcagatattgtgctcgttatggaggcaagagagaggagtggatcactgatcacagcagatctggcactggagcagggaaaggatgtctatgcgctgccggggcctgttaacagcagcttaagtcaagggtgtaaccgcctgatctttcagggggccggaattcttttaagcccggaaaatctgctggatgagatgggcattgcatacagcggggaatgtgaaaaatcagacaaaaatgaaaaaatgcttgaaagtcctgaatatatggtgtatagttgtgtcggtctgtatccaaagagcgtggggcagctgacagaagaaacaaagctgcgcccggaggaagttttaaagcttttagtgtctttggaattacagggatatatcagagaaatctcaaaaaattattatataaaagtgaaatgacggcgtgagggcgccggatggaggaaatgtttcaatggcacattatctggtaattgtggagtcaccggcgaaagtgaagacgatcaaaaaatttcttggaaagaactatacagtagcggcatcaaacgggcatgtcagagatttgccgaaaagtcagctcggaatcgatgtggagcatgactttgagcccaaatatattaccattcggggaaaaggggagattctcgcaaacctgagaaaggaagccaagaaagccgacaaagtatatctggcaaccgaccccgaccgtgaaggagaggcaatttcatggcatcttgcagcagcgctgaaattggatgagaaaaaaatgcgccgtattacattcaacgagatcacaaagaatgcagtcaaggcgtcattaaaaacaccaagagatattgatatggatctggtggacgcacagcaggcaagacgtgttctggacagaatggtaggatatcggatcagtccgcttttgtgggcaaaagtaaaacggggattgagcgccggacgcgtgcagtctgtagcactccgtatcattgcggaccgggaagaagaaatcaatgcatttattccggaagaatactggagtctggatgcaatcttaaaggtgaaaggagagaaaagaccgctcactgccaagttctatggaaccgagaaaaagaagatgacgatccattccaaagaggagatggatgagatcttacaggctttggaaaaagaaacatacgaagtaaaagatatcaaaaagggagagcgtattcgaagagcgccgcttccgtttacaaccagcactttgcagcaggaggcagcaaaggtgctcaacttcggtacacagaagacgatgcgtatcgcacagcagctgtatgaaggaattgacgtaaagggcagcggtacgattggtgtgatcacgtatctgcgtacggattctacccgtatttcagaggaagcagatgcagcggcgagagcgtacatcacagagaattacggcgcagagtatgcagcagcaggagaagcaaataaaaagactgagaagaagatacaggacgcgcatgaggcaatccgaccgacggacatttccatgacaccggcttcgttgaaagagtctctttccagagatcagttccgtctgtatcagctaatctggaaacggtttgccgcaagccggatgcagcctgcaaaatatgagaccacatctgtcaagattggtgccggggaataccgttttacagtggcaacttcaaaagtggcgtttgaaggatttcgtacggtttatacagaagcagatgaagaaaaagaagtaagcaatgttcttgtcaacggattgagcatggattcggaactgacgaaagaagagtttgataccaaacagcatttcacacagcctccggcacactatacagaggcaacacttgtaaaggcactggaggagcttggaatcggacgtccgagtacctatgcaccaacaatctccacaattctcggaagacgttatattaccaaagaagccaagaatctgtatatcacagagatcggagaagtagtcaacaatattatgaagcagtcgtttcctagtattgtggatgtcaactttacggccaacatggaagggcttctggatatggtggaagaaggaaaagtgcagtggaaagttgtcgtaagtaacttctatccggatctggatgaagcagtgaaaactgcggagaaagaattagagagcgtgaagatcgaggatgaagtaacggatgtaatctgtgaagagtgtggaagaaacatggtgatcaaatacggtcctcacggaaaattccttgcctgtccgggatttccggattgccgcaacacaaaaccgtacctggagaagattggtgttgcctgtccggtctgtggaaaagaagttgtgatccgcaagacgaagaagggaagaaagtattacggatgtgaaaataatccggaatgtgattttatgtcatggcagaaaccgtccaaagaaaaatgtccggaatgtggcggatatatggtggaaaaagggaataaactggtctgtgcagatgaacagtgtggatatgtccgaaatttgaagggaaattagaaggatttcgaataaaaacaagaggaaattgcaacaatttcattgaaaattcgtgaattgtatgataacatgagggtgtctattgaataggaacgagttgtatatacaattgagtctggaggagacggatgagcgtacagttattagataagacaagaaaaataaataaattattgcataataataattccagcaaagtggtgtttaatgatatttgtgctgtcctcacagagatcctgaactccaatgtcctggtagtcagtaaaaaaggaaagattctcggagtcagcaaaagtgcgcatgtagatgcaatcaatgaactgatcgtagagtctgtgggagcgcatatcgatgagatgctcaatgagcgtctgctcaatgtactttctaccaaagagaacgtgaatttggagacacttggtttttcatcggaaaaagtgcaaggatatcaggcaattattgttccaattgatattgcgggagaacgccttggaacactctttatttataagcagaatgagttgtattccattgatgatatcatcttaagtgaatatggaacagcagttgtcggactggaaatgctccggtctgtgaatgaggagagcgcagaggagacgagaaaggaacatatcgtacagtcagcaatcagcacactttcattctctgaactggaggcgatcatccatatttttgaagagttggatggaacagagggaattctggtggcaagcaagattgcagaccgtgtaggaatcacaagatccgtgatcgtcaatgcacttcgaaaatttgagagtgccggagtgatcgaatcccgttcctccgggatgaagggaacatacatcaaagtgttgaatgactatgtctttaccgaattggaaaagattaaaaaagaacgtttgtaaaagtcgtacagaagataaaagggtatcagcaagctgatgccctttctctgattacaggtaagaaaagcaggaggaaaagaacatgtatgaaggcaatgcagtagatcttcagatggagaaagtgatcgcggcagatgcgatcctggatgatgagacacatcactgtcaggtttttcgttatgatatggaagaggattacatatacttacaattaaaggaggacgatctgacagcaatctcgctggatgcaaagtatcagtgctatatttctacaaggacagagcttttgttctgcacaggcgtggtacaggagcgataccagtgtgaacatgggaaaattttggtctttcatattgagaatggattctatacaatttcggatatgaaaggacctgtaaaaagaaaataaactaaatataaaatttttgaatctctgttgacaaatagaaaacagagtgctattttatattcatgaggtttagcactcaatatgaatgagtgctaataacgtataaaataaggaggagttaccatgaaattagtaccattaggtgataaaatcgtattaaagcaattagaagcagaagagacaacaaagtcaggaatcgttttgcctggtcaggcaaaagaaaaaccacaggaagcagaggtaattgcagtcggacctggtggaatggtagacgggaaagaagtgacaatgcaggtagctgtaggagataaagtaatctattccaaatatgcaggaacagatgtagagctggatggagaagagtacattatcgtaaaacagaatgatatccttgcagttgtaaaatagaagaaagagacaattttttggaaacagtcaacagacgaagtataacaggagtgtgaatgaaaatggcaaaggaaattaaatatggagcagaggcaagagccgctctggaaaaaggtgtaaaccagcttgcagatactgtaagagtaactttgggaccaaaaggaagaaacgttgttctggataaatcgttcggaacaccattgatcacaaatgacggtgtgacgatcgcaaaagagatcgaactggaagacggatttgaaaatatgggagcacagctcatccgtgaagtagcagcgaagacaaacgatgtagccggagacggaacaacaacagcgactgttctggcacaggcaatggtaaatgaaggaatgaagaaccttgcagcaggagcaaacccgatcgtactgcgtaaaggtatgaaaaaagcgacagatgcagcagtggaagcaattgcaaatatgagccgtcaggtaacaggaaaagaccagatcgcaaaagttgcagcagtatcttccggtgatgaagcggttggaaatatggttgcagatgcaatggagaaagtttccaaagatggtgttatcacgatcgaagaatccaagacaatgcagacagagctggatctggtagaaggtatgcagtttgaccgcggatatatttctgcatatatggcgacagatatggagaagatggaagcagttctggatgatccgtacatcctgatcacagacaagaagatttccaatattcaggatctccttccattgctggagcagatcgtacagtcaggagcaagacttctgatcattgcagaggatattgaaggagaagctcttacaactctgatcgtaaacaaactgcgcggaacatttaatgttgttgcagtaaaagctcctggatacggagacagaagaaaagaaatgctcaatgatattgcaatcctgacaggcggacaggtaatttccgatgaacttggaatggatctgaaagaagcaacaatggatctgctcggacgtgcaaaatctgtaaaagttcagaaagagaacacagtcattgttgacggatgcggagataagaaagcaatcgaagacagagtggctcagatcaaaaaacagatcgaggagacaacatctgaatttgacagagaaaaattacaggaaagacttgcaaaactggcaggcggtgttgcagtgattcgtgtgggagcagcgacagaaactgagatgaaagaagcaaaactgcgtatggaagatgcactcaatgcgacaagagcagcagtagaggaaggtatcatcgcaggcggtggatctgcatatatccatgcttctaaagaagttgcaaaacttgcagagactctggaaggtgatgagaagacaggtgcgaatatcatcctgaaagctctggaggctccattgttccatattgcaacaaatgcaggtctggaaggtgcagtgatcatcaataaagtaagagaatcagaaccgggagtcggatttgatgcttacaaagaagaatatgtagatatggtaagtgaaggaattctggatcctgccaaagtgacaagaagcgcactgcagaatgcaaacagtgttgcatctactctgctgacaacagaatctgttgtttctacgattaaagaagagacaccggcaatgccggcagcacctggcggaatgggaatgatgtaataataagagggttcccggatatctgttttgatacagatatccggggctctttttttattttcgggatttcagcagtaatagacaaaagaattatagaaaaactgagaaattatgtaaaaattatgaatgagacatcatctataagtatcgcttaataataggagttaaaataaatcaggataaaaataaattgtaagtgggaataggcttgacaagtggtgggaatttttgtaccataacagataatctatggacatacatattagagaaagagaggaaataaatcatgggaaaaataatcggagaaggtattacatttgacgatgtcctgttagtaccggcatattcacaggtcattccaaatcaggtggacttatccacatatctgacaaagacgattaaattgaacattccgatgatgagtgctggtatggatacagttactgagcaccgcatggcaatcgccatggcacgtcagggaggaatcggtatcattcataaaaacatgacgatcgagcagcaggcagaagaggtagataaagtaaagagatcagagaatggtgttatcacagatccattttcactttctccggatcatacactggcagacgccaatgatctgatggcaaaattcagaatttccggagtgccgatcacagaagggaaaaagctggttggaattattacaaaccgtgatttgaaatttgaggaagatttctctaagaaaataaaagaatccatgacttcagaagggctgatcacagcaccggaaggaatcacactggaagatgcaaagaagatccttgcaaaggcaagaaaagaaaaacttccgatcgtggacaaagatggaaatttaaaaggtctgatcacgatcaaagacattgagaaacagatcaaatatccactgtcagcgaaagacggtcagggaagacttctctgcggagcggcgatcggaatcacagcaaactgtctggagcgtgtagaggcgctggtgaatgcgaaggtagacgtgatcgtgatggactctgcacatggacattctgagaatgttctgcgcacagtgcgtatggtcaaagaaaaatatccaaatcttccggtcattgcaggaaatgttgctacaggggaggcgacaagagccttgatcgaagccggtgtggatgccgtaaaagttggtatcggacctggatcaatctgtacgactcgtgtggttgcaggtatcggtgtaccacaggtaacagctgttatggactgctatgcagtggcaaaagagtacggaattccggttatcgcagacggtggtatcaagtattccggagatatgacaaaggcgattgcagcaggagcgaatgtttgtatgatgggaagtatctttgctggatgtgacgagagcccgggaacatttgaattataccagggaagaaaatacaaagtataccgtggtatgggatctatcgcagctatggaaaacggaagcaaggatcgttacttccaggcagatgcaaagaaattagttccggaaggtgtggaaggacgtgttgcatacaaaggaacagtagaagataccgtattccagctcatgggaggtcttcgcgcaggtatgggatactgcggaactgcaaatattgaggcgttgaaagagaacggacagtttgttaagatttcagctgcatctttgaaagaaagtcatccacatgacattcatattaccaaagaagcacctaactacagtgtagatgaataagatgaaagtgtgccggggcaggaaactgttccggcatttttgaaatcaggagttcagatgaaaataagatccaacagaagaaagagaagaagatatggacggagaagaagtgacaggaaagtattctatgcaagagtcggactggcagcgctgctgttattgacaatagtgctgattttaaggtcatgcatctcaaaaaagcaaggagagttgcgggcagatgtggatgcgtccagaccggagattgatgtacagcttctggatatcaatgagtactccagaccgggaatcgagtcagacgggatcacaggaatcgtgattcattatacggcgaatccgggctctactgcacaggagaacagagattattttgaaggacttaaggacagccatgagacatcagcaagcagtaattttgtcgtgggattggaaggggagatcatccagtgtgtgcccacatgggaggtggcatatgcatccaacgagcggaataaggataccatttcgatcgaatgctgtcattcggacgaaacaggaaagtttacagaagaaacctatcagtcgatggtgcagctgaccgcatggctttgcagaaagtacagtctgactgcggatacagtgatccgccactatgatgtgaccggaaaaaattgtccgaaatactttgtggaaaatgaagaagcatgggcgaatttcaaagaggatgtggcgaatgcactggcgaaaggcggtacggattaaaggaaacgaaaaagtatatctcttgcggtctgaaacaatgcttgctataataaacggacagaagagttgaagggaaagggcagagggagaaaatatgaatgaattgataaaaaagtttcgggaatcatgtgattataatatcgtactgatcggatttatgggagctggaaaatcgacggtggcaagaactttgggagaatggtttgacatggatattgtggaaatggatgaacttatctcagaacgtcaagggatgagtattccggagatttttgaaaagcacggagaagagtatttccggaatcttgagacgaatcttctgattgagctgcaaaaagcaagtcggacgattatttcctgcggcggcggtgctgcaatgcgtagtcagaatgtaagtgaaatgaaaaaaaatggatatgtggtcctgctgacagctgctccaaagacgattctggaacgtgtcaaagagaatgatgacagacctcttctgaagaatcataagaatgtggaatatatcgcacaactgatggaaaagcgccgggagaaatatgagacggcagcagatttgatcgtgcagacagataagaagaatgtgcaggaaatctgcaaagagatgattacaaaattgatggagatggatagtagagatgtttgataaattttttccggatgaatacctggcatccacctatgtgattccttttgaagagctgtatgagaagggataccggggagtcatctttgatatcgacaatacactggtaccacacggagcaccggcagatgaaagggcaaaaaagctgtttacgcgtttaaacaaaatcggattttcctcctgccttctgtcaaataatcagaaaccgcgtgtggagatgtttaatcaggagatacagactgcttatatctataatgctcacaagccttcaatcaagaattatgagaaggcaatgaagattatggggacaacaaaggagcgcactctgtttgttggcgatcagctgtttaccgatgtatggggggcaaagagaaccgggattcacagtattttggtgaagccgatccatccaaaagaggagattcagatcgttttgaagcgttatttggagaaaattgttcttcatttttataaaaagaagcggaaactggataaaaaaggttgaaaaaagacagaatctattatagaattataaacagtcgagaaaaggcagcgcataaagtgcgcatttgaaggaggattacagatgatttcagcaggagattttaaaaatggtgttaccgttgagattgacggaaatatctatcagatcttagaattccagcacgtaaaacctggaaaaggtgcagcatttgttagaacaaaattaaaaaatatcatcagtggcggtgttgttgagaaaactttcagaccaactgaaaaattcccgaaagcacatattgacagaaaagacatgcagtatctttacagagacggagatctgttcaactttatggacgtagagacatatgatcagatcgctctgaacgaagatgttgtaggagattctctgaaatttgtaaaagagaacgaagtagtaaagatctgttcacacaatggaaacgtattctcagtagagccacctctgttcgtagagcttgcgatcacagagacagagcctggattcaagggagatacagcacagggagctacaaaacctgcaactgtagagacaggggcaattgttatggtaccattgttcgtagaacagggagatgtactgaagattgatacacgttcaggagaatatctctcacgtgtttaatacgaaggagacgcctcagggcgtctttttcttttggcaaggagagttgtttcatttatagaatctttatagatagttcatataaagttcgttgtattttgcatcagagtcggatataatcaagaaacataatattgttcacatcagatttcaaaggcacattcgtgccgcatttctcaaaaagatgagcacacaatcaggaaggagacagtatggaatatagagaatttgtgtgcgcagcaattgaaacaatgaatcaaaaggaggggaaaaacgggatacaggcaagagaacacagagcagtaaaaaacaatgggaagattcgtgttggactgttgcttcaggaaacgggatccaatctgtttccgacaatctatctggaggaatattatgagaagtttcaaaaaggggaaactctggaacagattgtgtcggagatcagccagctttatcaaaagatcaaggcaaaaaatatcatagatgtggattctttttttaatctggaatcatggaagaataagctggggatcaaagtgataaaaacggagaaaaacagggaattactggaagaaatcccgcatttggatgtgctggatctttcgctgaccttttatgtcattttagaccggcaatgtgagggaagcgcaacaatgcagatcacaaatgagtatatgaggcaatggaatcttgaaacagaggaattatatgaaatggccatgcgaagtgctgtcagactgcttccggcagaattctgctcacttcccgatatgatccgcaggataaccggaattgaagtggaggcaatccgcggcatgcagagagaatgtcagatgtatgtactgacgaattccagcaagatccagggggcagcctgtatgttttatccgcatgttcttgagatgatcggtgaaattttgaaagaggatttttatattctcccgagcagtatccatgaagtgatcattttgccgaaatcaaaaggaattgcaaaagaggaactggatgctatgatacaggatatcaatcatacgcaggtagacacagaagaagtgctcagtgaccatgcatatctttatgaaagaggattggggaaaatacaaatggccttttagaaagaaaagatggaatgagaaaattgaaagaaatgctctttacaagattgcaaaattgtgctaggatatataaagtgttcggttgaaattcaaagggcacaaaagattatgcgtctgtagctcagtggatagagcgatgccctccggaggcatgtgcggcggttcgactccgcccagacgtgtattttttatatcgaaaagaaatcagtaaaagggattgagcggcatccgggcggatgtgcttcaatcccttcttttaaatcaaattcacgtttctttgcaaaatccgataagtaataaagtatccgacaatggcaagtgctgtcgtagtacaggttccgatcaggagcatctgaaagaaatactctgaaaagctggtctgtgcaggagaaaaaacataatcaggaaagacactggtgatgatggatactcctatggtgacaatctgaataatgagattcagaataaaatatacagcaatggatacaatgattcggtgtgcgggaaccagctgtccaattgcaatacttgtataaataaatagcacgcaggaaagaattccgacaaatgaaaaaaatacaacaagaccgcaaaaggaagagaaggacataccaagtgcagcctgaaagtcaggtttgatcctttccagagcagactgtatattgtctcccgaaatcaaaaaccacgcagcggcaaagcagattgtaagatccagcacataccagatggaggcagacagaatcttcgcccagagctgggtcagcggtgacgccggaagcgtccaggtgatgtatccttcatctgtaaataggttcttataaaaccggacggcgtacatgatacagcatccaaaggaaatcgcagaaaacagcattgtgagcacgacgatcaaaagggcgataacaggagcaaattcttcaggatctgctgaaaagtcaagatgatcgattacaaggaagcgtgccatcagacagccgatgatcagaatgatatgcaggactgcaaacatacgtactccatattttaaatcatgtttgatcaatttttttaacatcgaaatacctcccggaataaagcatctaccgattttttgtgtcccctgcggatctcatcgacagaagcgttgagcgtaatctgcccgttttgcagaaataaaacccgatccagaacattttctacatctgcgatcaaatgggtagagatcaaaacagacgcatcttcgttgtagtttgtcaggatggtccggagaatataatctctggctgcaggatctacaccgccgatcggttcatctaatacgtaaagctgtgcatcccggctcatgacaaggatgagctggactttttcttttgtcccctttgagagtgttttcagacgaagcgaaggatcgatatccagatcctttaacatcgtatgagcacgggagacatcaaaatcggagtaaaagtcactgtaataggaaatcagctctgaaatcctgcggcgttcatccagacatccgcgctccggaagataggaaacgattttcttcgtctctacaccgggaactgatccgtttattgtgatctgtccgtcagttggtaaaagaagcccgttgatcagtttgatcagagtcgtctttccgcttccgtttggtccaagcaggccgatgatctctccgcgttccagagtcagatcaacattggaaagtgcaaaaaagtgattgaattttcgggtcagccccttgcattcgagaatggggttcataggtctacctccttgagtgctttctgtatcaatgcagcagtttcttctttctgaaagccgagctgtttcatcttttcaagaaactgcaggatatgttcggatgcgagactggtcttcatttcatccagcagctgggtatcttctgtaataaaacgtccgcttgttcgctgagaatataccagtccgctccgttccagttcggagagtgctttttgcattgtgttcggattcacggcagcttctacggcgagatcccggacagagggaagtctgtcaccgggtttgtagatgccggatacgatatcctgctgaatacgctccatcaactgtagatagatgggacggtcattgtccaattcccatggcatttgatcacctcgttttctatgaaaaactaactgtactatatatgtaatacaatcgtataatgaagttgcggatttgtcaagctacttttcatttgccgcaagaatttcggcaggcagttccgggtgaaagataccttcctttaacatacgaatctcatatttgtaaggcgcataggattttttctctttgacagccgatggaatgtacggtgtttccagaattttcgggatatccataaaatctttgtggtgtacgatatggtgtatcgcgtcaaatccgatgtgtccgaaaccgatattggcatgccggtcttttgcggctcccggaatatttttactgtcattgatgtgaaagacggcaatctgatcttttccgatcaggcggtcgaactcatcgatcacatcatcgaaatggtggatgatatcatatccgctgtcactggtatgacaggtatcaaagcagattctcagtttgtcattgtatacaacaccgtcataaatctgtgcaagctcttcaaatgtgcgtccgatttcggaaccttttccggccatggtttccagtgcgatatggcaaggggtatctgctgtcaggacagagttgagtcctttgatgatctggcggattccggcgtcagttccggctcccacatgagaacccgggtgaagtaccagagtatggcttttgcaggcggcagtgcgctcgatctcctttgccaggaattcgactgcaagttcaaatgtttcaggttttacagaatttcccagattgatgatatagggagcatgtacgatgatttcgtcaatgccatgttctttcatatattcccaggcaggcgtaatattcagttcactgatttctttgcgccgtgtgttctgcggagctcctgtatagaacataaatgtgtttgcgccgtaggaaacggcttcttttgcggaaccaagcagcatctctttaccgctcatgcccacgtgtgatcctaatttcataacatatatcctcttctttccttattatataaatcctttcggatgcgtgtacaaacagcttgccgtaaagcattatacatgataaaatagcaaaatgaaagaaaaatagaacggagagtggaacagaagtgaaaacattgttggaactgattacaatagaaatgaaagaagcctttgaggcagccggttatgatgcggcatttgcgaaagtgaccttgtcaaaccgtccggatctgtgtgaataccagtgcaacggagcaatggcagcagcaaaaacttacaaaaaggcaccgatcatgatcgcaaatgacgtggtggcaggactgcaggaaaaagactgttttgaaatggcagaagcggtgaatccgggatttatcaatctgaaagtaaaaccatcctttgcagcagcatttctcaatgagatggcagcgagtgaaaagctgggagtggaagagatggagacaccaaagacgatcatggtggattacggcggaccgaatgtggcaaaaccgctgcatgtaggacatttgcgttctgcgatcatcggagagagtgtaaagcggattctgcgttataaaggaaacaaagtaatcggtgatattcatctgggagactggggatatcagatggggctgatcattacagaattgcagaagagaaaacctgagcttccatattttgatgaaaacttcaccggagaatatccgaaagaggcgccgtttacgatcggagagcttgaggaaatctacccgacagccagtgcttatgcaaaagaacatgaagagtatcgtgaaaaagcactgcaggcgacgttccttttgcagaacggacatccgggattccgtgcgatctggaatcacattatggcagtttctgtagcagatttgaagaaaaactatgcaaatctgaacgtgtctttcgatctctggaagggagaggcagatgcccagaaatatattccggatatggtggagatgctcaaagaaaaaggatatgcgcactatgatgaaggtgctcttgtagtggatgtacaggaagagacagacaaaaaagaagtgcctccgtgtatgatcttaaagtcagacggggctgcattgtatgacacgacagatctggcgacactggtagagagagaagaactataccagccggacgaagtgatttatgtggtagataagcgtcaggagcttcactttgtacaggtattccgctgtgcaaagaagaccggaatcgtaaaaccggagacagaactggaatttttaggattcggtacgatgaacggaaaagacggcaagccgtttaagacaagagaaggcggcgtgatgcgtctggaaaatctgattcgtgaaatcaacgaagagatgtacaagaagatcatggacaaccgtacggtttccgaggaagaggcaaagaagactgcacagatggtaggacttgctgcgatcaaatatggtgatctttccaatcaggcatccaaggattatgtctttgatgtagaccgctttacttcctttgaaggaaatacgggaccgtacattctgtacacaattgtccggatcaagtcgatcctgaataaataccaggaagaaaacagtctggaggatctggtgatcagagaggcatccagtgaatttgaaaaagcactgatgctggaatgtgcaaaattcaatgatgtgatcgagacagtttatgaagagacagcgccgcacaagctgtgtgcatatatttatgatctggccaacgcatttaataaattctatcatgagacaaagatcctttcagaggaagacgcagagaagaagaaaggttatatcgcgcttttgaaactgacaaaagaggttctggagagttgtatcgatctgcttggatttgaagcgccggagaggatgtaggatatgacggaaaaattgttttatctggacagtcatctgcagagattttctgcgcaggtagagcagtgtgtcccggatggagaaaactggcagatcgtgctggatcggactgccttttttccggaagggggaggacagtatgcggatacagggatacttggcagtgcgcgagtgctggatgtgcaggaaaaggatggtgtgatttttcacaggacagatgcgcctctttcggttggagactgtgtagagggaaggattgactgggatcttcgttttatgaagatgcagcagcataccggagagcatatcgtttccgggttggttcataaaaggtttgggtatcagaatgtgggattccatctgggaagtgaagactgcacgatggatttcaacggagagattaccaaagaggagattcgcgagattgaatgggaagccaatcgggcagtggtgcgaaatctggaagtggaagtgacctatccggatcagaaagtacttcagacgcttgtataccgcagtaagattgagattgaaggtcaggtacggatcgtgacgatcccggaatatgatgtgtgtgcgtgctgtgcgccgcatgtgaaacaaacaggggagatcgggcagatccgtctgacgggagtgcagcgttataaaggcggcgtccgtgtgaccatgctctgtggattccgtgcgttggaggattaccgcaggaaagcagagagtacagggtgtatttcttctgctctgtgtgtgaaagaagaagacgtggcgcagggggtagaaaaattaaaaaatgactgtacagaatggaagcagagatatgcgcagttaaagcgagacatgcttgccattcgtgcagaaaggctggccgggcaatcggaggatgtgattgtgtttgcggatgatctggagggagaagagctgaggattctgatgaatcttgttctggatcatggcaaacggctctgtgcagtatttggcggagatgaggagcatggtttccgttatgtgatcggaagcaggatattggatatgagaccgcttgcaaaagaactgaatgagacatttcatggcagaggcggcggaaaatcggagatggtccagggcagtgtgcagggaaatgagagtgagatgagggcatggatacaggagaaagcgaggaaaatgaatggatagaaattcagaaccggtgaaattctggcatgtatgtggtccactcttattgtattgggtgattcagtttgttgcccagttagtggcagagcttgcggtgatgattccgcatatcggtcaggttatggattatgacgcactggaaaagagcactacgacagaagagatgaccgaggcgattatgagcagtgtgcagggaatgtacgagatcgtgggtaaatatattatgccgattcttgcgttcagtgcgctttgtacgttgtttttgacggtaccgctgtttttgaaagaccggaagaaggaacgaatactttataaacaggcagtgaaagttccgggagtcaagaagtatctggtcgttttcggactgggaagtgcattttgtatcggattaaattgtctgatgatgttgtctgccctggcgttgtcctctttagcgtacagcgatgtggatatgcagacgaatgtggtcgtgcagttgatttgtatggggatcatcgtgccggttgcggaagagttgatgttcagggggcttgtttttaaaagattccgtgaaaagagtacattctttagtgcggctctgctttcgtctttgattttcggattgatgaacgggaatctgctgcaaatcctctatgtcggagcaatgggaatggtgcttgcctattcctatgagatttgtgggacgattaaagtgccgattctgcttcatattacagtgaatgtgatgggaattcttctgacagacagtgcactgggagcctggatccaaggcgatatcatgcgtcttggaggggcggttatagtcagcgcctttgtcggttcttccatgtatgtgcttttgagggggatgaagaagcaggaagtaccgcctgttgaataaagcttttaggaaaaagattacggtttacgccggtgggggtgaatcgtaattttttttgtttattaatatttaagaatttatacattgactttcaggagtcagagacgtataattcatacataacttaatcgacggaagttcttccggcagaggttataagttccatggatcgtaatgagatccagtcaagaaatcaagtgttaatttctaacagatttcagttattttaagtgttttataatgaatcatatatggcaatagtctgtagaagatacaggctcagttctgatattcctgtctgagaaaatcatttctatttttatcttacgatcttacagatttccggaatgcagaaaataattatcgatttaaactttcaaagtttaaataatacaacaatataaaatctgcaatatatgtgcagaaaaagaaaggaggaagtctgatgagaagagaaaaagatgaaaaaggctgaaattctataaaaatccggtaaaaagtaaacaaaatcatgaaaaagaatcaaaaggagtagaaaagtatgaaagcatttatggaagaatatggagtaatcgtagtagcagcaatcgtcatcatgatcattgtagtagcagcatcaccaatcggagacagcattaaaagcggaattatggaagcagtacagaaattgacgaacgcacttgcagatgcaaatggagtcagctaatgaaaatatccagggaagcatgggttttgaaagaggagtgcttcggaccgctgctcccatatgtaaaagatcagcaggttacagacatcaattataacgggactgatgtgtggatcgaacatttaaaatatgggattcgaaaagctccggtgaatctgacaccggagttcgcaggccgatttagcgttctgatttctaatattgtgagtgaacaaatcaataaatttaataatgttctggaagcggagacggacactctcaggatttcgatcattcatccaagcgtgacaaatacagggtattccatctctattcgaaaaacaccagcggttatgcgtatgacagaagaaaaaatgctggccgatggatactgttccagagaggtgcttctgtttctgagaaattgtatggaagcaaaattgaatatggtcttttgcgggtgtccgggagcaggaaaaacagaattgctgaaatttttaacacaatttataccgaagcacgaaaaggtgatgaccattgaagataaccttgagattcattatcgggatattaatccgggggcaaactgtgtggaactgaaagtggatgaagaatttttctcctatacgaaagcaatcaaatctgcacttcggcaaaatccgcaatgggtgcttctgtcagaagcgcgttctacagaagtgaagtatcttttagaatgcttttcgacaggtcttcacggactgacgacacttcacacagatgatacgaggaagatccctgaccggattcagaatatgatgcaggattcttatgcggcatccagaatggaaaatgacatctacagttttttgaatgtaggaatattgctctgcaaaaaggcaaccggaaatggaaaggtctttcggtttgtcgatcagatctgcctgtttgacagaatcggagaagaaaaccgaaagtatctgatcgtggaaaatggaaaagtagtgtccagagaaatttctgagaatatcagaaaaaaatttcaatgggcaggaataagatccccctttttgggagaaagcgaggggaaaatggtgtgcaggtaaaacaaaaaaagaaaaggcgaaaaaggcacatgtttcactattggaatccgaaactgctgaatctggagattcagcggtgcggatacacattcagtgcttcgtcctatgtgaaatatctgttggcggtctatctgggaattgcaggatttgcctatctttttcaactgcagattttcttttcagtgattgtaatggcagcggcatcgatatttgtgccaacggtatttttaatgaattataaaaatctgtatgaagaaaagaagtttgaagatctgactgcctatatggaacagcttttatattcgtttaaacgcagggcaaagattctgacggcgctggaagatacaaaattattgttccgtcagggagagagccgtttatacaatggaatcgaatatgcagtagagcatatccagtccgcacaaagtgagggaaacatttataaggaggcgttttcagaaattgaaaaagagtatggatgtaaaagattgtataagatccatgattttttgatgcaggtagagctgtcgggaggaagcccggatgcagcgattgagattttactgaatgacagaaaaatgtggattgagaggatttatggtctgcagaaagaaaaaaagaatatcaaggtcaaggtaacgatcgggatcggactctcttttctgatctgtgccatgagtattctgatgctgcccaaagagtttgatatcacacagaatccaatttctcaggcggttacgacaggagtggtgattctcaatatgctgatctggtatgcagcgcagaaaaaactttccggcagtttgatcttatcagatgaagatgtcgatgaagcggaaattcgggaaaaatataagtatgttgtgaagggaaaccgggaaaaggaaaggcttaaatatagtatcattggatgtatcttcggtgtgacggcgatcttactggggaatactgtggggatgacagcagcaggtgcggcgggtgcagcagcaatctggatgttgacgcaggagaagcgaaaatataaacatgccagaaaacgtgtattacgtgaggtggaaaaacaatttccggaatggctgatgaatctgtccctgcagcttcagacggataatgtgcatgtatctttaaagaagacaataccggacgcaccgtttatcttaaaacaggatttaacgcgactggtagaagaaatcgaacagcagccgaatgcacttcagccttatctccgctttatgagagagttccagattccggatgtgctttctgcaatgaagatcttgtattccatggcagaatttggaattggagatatgggagggcagattgatgcgctggtacagagaaataccgttatgatggatcgggcagagcgtttgaaggaagaagatatgatggcaggtgttgggtttcttgtactgcttccaatgatcacgggagtcgtaaaaatgctcgcagatctggtactggtcattttggggattttgtctgttgtaaatacaatttagaaggtttgagagaaaagagggcaatatcatgaaagaatttttggaagaatacggttcgatcattgtaatttcaataatcggatatgcggtcatgtccggtttatggaaaattttaatacaggtaagttctgtttgagaaggagaatagcggaatgaaagaatttatggaagagtatggcggtgtgatcgtgacgtgtatgctgggaatcatgctgcttggacttttgtattcgctgcttgcttcaggaggtcagctgcataggctggcagagctgttttttgacgggatagggataaaaatgtcaggagggcagatgtgaagagctggatcggagaatatggaaaaatcgcagcaatggcaattatcctggccgtattatttgcatttgtttggaatcgtactgatcatggatatctgggcgcgctttcaaaggcagagccaaaatcatttttaaaagcaaccgataattccgattttcttgtacagctgaaaccgagaccggatccggtcttgacggtatctgtcagtaaactgaagtatcaaagaagatatgaccttcttcatggaaaagaaatcagtgccagggctgtggacgcggatggaagagagcttccggtcagcgtgataaaactgatcgctccagatggaagtcagctggaaaaggaactaaatccagaggcgttttggacagcgcagagaggtgtttatgagattacttatcaggcagaggaaaactatcagggggcttatattagaaaagtaacaaaggtatgtcgggttacagtagattaaagtgcggttgaaaggaaaagaaaaatgaaaggtgcgatcgaaacaatggtgggagttgtactgattgccttcatggcagtgctgagtactgcctatatcagcgcatcgttgaatacacagaaggcacaggcttatcattctacagttgtaacagagattgaagcgagtgattataatgcagaggttctggagaaatgtaaaaagaaagcgctggaaaacggatatgaaaatctggatattcaggttgtgaccagtgcggcaggaagcaaatatgcaaaagtgacattggcataccggtacacgattccacttttgaatatgcttttggagcatcagatcacaggatatgcaaaatagaaaaaaggggaaaggagagtatgccaggaacggatgagacatgcagtgatgggattttttattttaattatgctgatttttgcaggagcatcgatttatacggcggagacaaagacgatgcatcagaatgagctggacagtattctgggagcagcaatggaagaatcgatggagattctgacagttaatccgacatattcgatcgggaaagaggtggaaggaaaagagctggcagcagattttattcagaatatgctcatgcgaacaaccagcaaatcgacatttgaagtagagatactgacagcagattcacagaaaggtttgctggatgtgcgggtgacggaatattatcggcagatatggggaaatggaaaggcggttgccagaaaaactgtgatattggatgatgtagaaggaaaagaagaggttttctctaagatatcattctggaaatcatacaaaaataataaagtcgaggaaaaacgtattgtaaagcaggtggtagttccggaggggattttgctgcccaaggaaatactgccggttgaaaatggaagtggagatgagaaagtgaaaggctggagagcagtcggccagttggaaaacaccatatatacaaaagaaaatatcgggacagtgcaggcgaaaggcgatatggattttgaagctgtttatgagaaaaccggcagtaaggcagattaaaaaggaaaaatattacaaaaatattaaaaagttattgctttttcatcacgtatcgaatataattcttattgtatgattaaacttggcgataataccacacaatcctttcaaaataccacaaactgtattgaaaaagtgcggaaaatcaggtattatgtagaatatgtggggacataaataagaatattaaggataggtgaaagtatgaaaatgaaaaaagtacgaagtgtactgcttgcggcagcattaacgtgttccatgatagttacacctgttatggcggcaccagatgatacaacaagtcttcagaatcagaaagaatcagctcaggatgaagtgaacggtcttcaggcacagctgaatgaattgtttacaaagacaaatgatctggaaacacagctgatcaacaaagggcaggagattaccaaggctcaggaagacctggctgtagcagaagagaaaaagcagcagcagtatgaagatatgaagcttcgtattaaatacatgtatgaggaaggcgatacttcagcattagaacgtattgtagcttccggaagtatctcggagatgcttactcagacggaatatgtggagaaagtacatacatatgaccgtgataagttgcgggaatacgcagagacagttcaggaagtagaagatctgaagacatctctggaatcagatatgacaaaactgcagaatctggatgaggagtacaagacacagacagcagagctgtcaagtacgattgagtccaagagagcagaagtgtctaatctggatgcaatgattcaggaagcagcaagagcggcagtagaagctgcgaaaaaggaacaggaaaagaacaacacggtaaataatgaaaataccaatacaccgtcaggcggtggagataatagcggtggaactgtaacgccggcaccagagccgacaccgacaccaactccggatccgacaccgacaccgacaccgacaccaactccggatccgacaccaactccgacaccgacaccggaaccaaattacaatccatctacaggaaatgccattgtagatcgtgcatacagctgggtaggaaaagcggagtacgtatggggagcctgcagtccgggagcattcgactgttccggattcgtatcttattgtttgacaggagcttacagccgtcttgggacaacctatacattcctgacatggacacaggtaagtaatcctcagccgggagatgtagctgtaaatgaaaaccattgcggtatttatatcggcggcgggcagatgatccatgcagcagattatggaatcggtgttattgtaggaccggttcagagcggtatgatctacgttcgttactaaagaaaaattcatatacaaagtacaaaagaaaagccctgatggtcatcgtgtcatcagggctttaagattcttagatcagtttttggggaacaatttcaagccagtatccatccggatcagagatgaagtaaattcccattcccggattttcgtagcagatacatcccatttctttgtgctttttgtgagccgcatcgaaatcgtccacttcaaacgcaagatggatctcattgtctcccaggttgtaagggcgatccatatcgcgcagccaggtcagctctaaaagatgtggagtagttccgtctccaaggtagaccagggtaaagcttccatcctcagcgtcttttctgcgaacttctgtcagatccagagcttctttgtaaaatgcaagagatttatccagatccagtacatttaaattgttgtgtgcaaatgtaaatttcatagagtacatcctttcttttccttttccatcagcataccatagaaagtccttgcaatccagtattttctatgatatactactagcgttgcgaaaaaacacgtatgcgtggtatcactgaaggtgcctaagtttgacgataagacaagccggtctcagtgtaaagaaagtatacggaagtaaaaaaccaatttggaggaaaaaacatgagcgttatttcaatgaaacaacttttagaagcaggtgttcatttcggacatcagacaagaagatggaaccctaaaatggctccatatatctacacagagagaaatggtatttatatcatcgatctgcagaaatctgtaggaatggttgacgatgcttataaagcagtttctgatattgcagcagaaggcggcacaatcctgttcgtaggaacaaagaaacaggctcaggatgcgatcaaaacagaagcagagcgttgtggaatgttctatgtaaacgagagatggttaggtggaatgctgacaaacttcaaaacaatccagagccgtatcgcacgtctgaaagacattgagagaatggcagaagacggaacatttgaagtacttccgaaaaaagaagtaatcgagctgaaaaaagagtgggaaaaactggagaagaaccttggcggaatcaaagaaatgaaaaagattccggatgcgatcttcatcgtagatcctaagaaagaaagaatctgtgtacaggaagcacacactctgggaattccgctgatcggaatctgtgatacaaactgtgatccggaagaactggattatgtaatcccaggtaacgatgatgcaatcagagcagtaaaattaatcgtttccaaaatggctgatgctgttatcgaagcaaatcagggagcagcagaagatgcatattatgaggaagctgaagaagcagtagctgaagagactgtagaagcagaataattatgaacgtaaatgcttcagcctgaacatcaggttggagcatttttggtaaactatttcaattcatggaggaaaaaatcatggcaatcacagcaagcatggtaaaagagttaagagagatgacaggtgcaggaatgatggactgcaaaaaagctctgaatgaaacaaacggagatatggacgcagcaatcgagttcttaagaaagaacggacaggcaaaagctgagaaaaaagctggaagaattgcggcagaaggtatcgtaaaagctgttgttaaagacgacaaagtagcagcaatcgtagaagtaaactctgagacagatttcgttgctaagaacgaagaattccagggatttgtagatgcagttgtgaatcaggttgcagattctgatgcagctgacatggatgcatttatggcagaagcatgggcagctgatacaacaaagactgtaaaagatgctcttgttgaaaaagtagcagtaatcggagaaaacctgaacatcagaagatttgaaaagatcgtaacagacggatgtgttgtagattatatccacggcggcggacgtatcggtgttctgatcgaagcagaggcagacgtagtaaacgatgaaatcaaaaaatgcttaaagaacgtagctatgcaggtagcagctatgtctccaaaatatacatctcgtgcagaagtttctcaggaatacatggatcacgagaaagaaatccttcttgcagcagctaagaaagagaatccggaaaaaccggaaaacatcattgaaaaaatgatcatcggacgtctgaataaagaattgaaagaaatctgtctgttagatcaggcatatgttcaggacagtgaccttacagttgctaaatatgtagaaaaagttgcaaaagaaaacaatgcaaacgtaactgttaagagatttgttcgttttgagacaggtgaaggaatcgaaaagaaacaggaagactttgcagcagaagttgcagctcagatgggaaactaatttatcaatcgttggactgataaaaagcgaattaaatagcgtatttaagcggtttctagctattttgacaagtgttataaactactgtaaaatctcataaaatatcgtgctattttgggtacagattgggtagagtattgggtaaagaaaattacccaacctcttaacgaggaatttgcttgttgtttaaaatagaaagggaacgctgtgagtgatgagagtatattgcggaagtgatatgctctcattttttagaatattaaaaagttgactttggagaagaatagattgggagtgacattaatagtgaaaaggataatagcagaaataatattttggatagtaaatatcgtattgattataatgtcttttatgacggatagacctttggcatcatttgttactacgattatttgtagtacaccaatgaatcctttgttattaaatcgtatacaaagaaaaattgatggcaataaatttgatttttggtatttattaaaattgatattaacctattgtgctacttcaaatagattatgtgaaaacctgtaaaaccgcaaagaatccctacagatattaaaaaataaaatttttagaatatcaattttttgatttttccaagttcacaggtttcaccgaaaatactattcaacgcaatacagagattgtatgccagtactttattaaccagacgggtacataacccctgaaagcttttggctaacactctttctgcatttaactgaccactcaattgagagaatacggtttctacccgccttctcagtttgaatattaactgacgtacggatttcggccaattttccttactgttggaacgtttcagagcaaaaagacagatatttttttcctgcatttcctgtttcatgttttttccaacatagcctttatccgctaaaattgtaacattagaccaatggtctgccagatcacgtaatccttcacgatcatctgtagatgccggtgtgatctcaaatgatgcaatatatccttctaatgtaattaatgcatgtactttatatccataataggtttcttttttggaaggacattttccataatcagcaccatggtcacgaaaggctttacaatatcgtgcacgcccaaatttacagactgcaagtggaaaactgtcgatgatgtaataggaactgactggaattgggaatacggaaatcattttttgtcgtaacaattctgttgtctgcatcagggcgcgtctcgttctgttaaaacgacttctgctgcaaagctgcggaaaaagatgcctgtagtttcgtttcacaaaagaaaaccatgcattctcagaatcaacgcctgccaattctccacagagactgatagtaatgatttctgagtcagataattttgcattcaggatatgccgtcgtctggtaacttctggaggtgcaaactgatgatacaattcgtcaataataacgtaagcggttaaaataaagtcttcaaaagttgcaataacagtggtattattatcttggaacttcaacataatgatgcctcctttcgttgtattccctacaaataggatagcacattttgttgaagtttctttatattttattttattttattttatctagtgtgctgtatcgttgatatttaacattattactgcatcttattcagatgcagtagtaaatgtcggatacaaggaattcaatttaattcttgcatcctccgttcgaaattgccagtttacctttgcggctacggtatttcgttcaacttcccatgctgataattccttacgaagatttgaaatattatcaatccttctgttcaaacattgtctggtcatgacgttaagttcgatttctgcaatatcaagccagctgccatgttttggtgtgtagtgaatctccaaccgtttcatgattcttctggcttcatcagcagggtaacgtttgtacaatgatgctggtttatgtgtattaagattatccattacaagaattattttttctacatctggatacatgacatcggcaagatatttgatttcttctgcccagtcaattgcagtccgatgttcccgaacacttacatgatgagctccaccaagcggttctacgaatgcaaaaatgctgcatgtaccatttctgacatactcagaatctactttctgatcattgccgggacgcataggaagtggggatcttgcctcgccaagtaactgatatggtttttcgtccatacaaacaaaggggcgttgtgggttatatggaagttcgtatacatcgagaacatcctccatacaagctataaattctgcgtcctctcttgagggaatgcaccagtattcatttttgtgaggtcgaagtttgttttttttaaggctctacggatagcatctttgctaaccggtgtatcaagcactactttggcttctttttccagcagacgcaaagtccatctggaatgaccttctggaacaggaccgcaggcaagttcaataatacgtgcttctgcacgtccatcaaggatacgccttgcattgtcggaattgatatttcttttgaactcggtaaccgcttcaatgccaccggaaaaatatttggtcactgtattcgttacagttgtcaggcaaacaccatttgatcttgcggattgctcatgggttaatactttcccatgagcctcatccaaatcaataataatctggcatctgcttcgaatagttttagatgtattacttttgcgaattatagattttaatgtcttcaattcatcatctgtaagtttaatgacatattttcttggtcttgccatataaatcaccgccgttttcttttattttaacatgaagcggctataatagctataaatatttagttaaatatcaacaatacagtgcactagcacaacaagttaaattaaataaggagtatcgttagattatcaaaattgatgattaagcgatactcttttttgaaagagccagttcagtattaagatcttatgtagatgcccataacttcagtgtgctccggacgtgtgtgctccgatatggtgtctccgatttgctgactcttgagaggagcatatctgccgcaaggtattctatctttgtgcgtggaatatcattggttgtcaagtgtggttggatgatcctacaccctgcttaattataaaagcaggtaactctgaaaattacatttggtaaaccgtgcattatacggttcgaacttatttacgctgagggcatacataaatccttgatatctcttggaaaagaagagacaatattctgacgttcttgcaaatctgaatgtaatgttttacgaaatagagccccaagattgaatttattggaaaggtttagaaggatatttttggaaaatacctgaagtcagctgtcgaaaaacgagaattcaccagttttaaaaaatgtgaaaacgtggatgacttttgttgatgaacactgaataagagataagatacatatttttattttcttgatttaagcgttgtttttctcctaagattttgcaggcatgagaaataatactgcgaggttatttaatttgccgggggattttctgcaattattcatattttacttttttacttttattatataatttacattatttagtgtctgctgagcaaactgaaaacacttgattttactgacttttgccccattttctggtataatgattgcaaggattttaacaaaaacaaatcgtttttcttgcggttttcttacagattttaagtataaaggggctaaaacaatgtacaaaccgatcgacaagttacagcattcattcctcgatttcaaccaacctatgggactccacatgaatccggataaccgctgggtcagactggctgaccgaatcccatgggatgaattcgaagtaaaatatgccaagctgtttccaagtgatacgggtaatgttgccaagcctcttcgcatggcattattcgtgacgaatctgttcaggattcagaggcgaatactttgtgctcttttgcatctgttccgattctggcatgaccggaacagatgtaagagttggaagttacagatagctgcttaatcagcagacactatttagacatatatgtaaaaagcaggagggataatatgaaggatataatgtcgataaaaaaacgtctggaacagaaatcagcaattaatgggaaggctggcgttgcaattatgtcagacatgctaaatgacgagaagataaggaatcttgtaataaagcactataatagtattacatgtgaaaacgagatgaaaccagaaataattttgggagatgttcctgtattcagtgttgatactgaaggaagtatatgtttagatgaaaatggcgatccggttttaacacttgatttcagcaaggcagataaaattatggattttataaaaaaacataatgagaaaaatccagatgatacaatacgggtaaggggtcatgtactcgtatggcattcacagactccggattggttttttcgtgaaaaatatgactctcagggggcatatgtgggtaaagaaaagatgctgaagcgccttgaaaattatattcagaaagtgatagagcattatgacggagtaaatagcccgtatcgtggtattatatatgcctgggatgtagtaaatgaacagattgagccggacgattttcatccagaaaaaaacccaggatcagtgcgctatacatgtaataacaagaatacgggttggtataatatttttcagggggacattagctacattactcagtcatttgtttttgcaaaccgctatgcgcctaaagatatcaagttattttataatgattacaatgatgcggatccggtaaaaggggatgctatttgtgttttgctcaggcagattaaggatacaaagggagcacgtattgatgggatgggaatgcaggcacactatcatatggagtttccgtctattgaacagattagagaagctgtgtatatgtattcatctattgtaaatgaaattcagtttacggaatttgatatgcagtcaagcaaaagttatgacggatcagaccgcgagttggagttagagagagagggagcaaggtataaagagttgtttcgaacaatttatagtcttgataaggaagataaaattaatattacaggtatcacattctggggcacccatgactcagtttcgtggctacaggaagctgctttggtaggaggtggatctgatggaaacagacctcagatgccgttgccatttgatgatgcctgtaacgaaaaaccagctttttggggaattatagacgcatgataaaatatcgctagggggggaaaaggattgaagttatcatatttgttcagtgatgggatggtattgcaacgaggaaaaaggaattatatttggggagagacgagccctgaaattatagtaacgggaatactcgacggcaggaagtttaatactaaggcagatacacatggaatgtttgtggcagaacttccggatcttccggttggtggtccgtattgtatggaaataaacggtgacgagaagcgtgtaattagaaacattatgagtggggatgtatttcttctgggcggtcagtccaatatggaattgcgaataaaatttgtaacagagcggtttgcagatgaaataaagaaaataaatgattcgtttatcagaaagtttgatgttccgaaagaatatgatttcggagagaaaagacaatggctttcccagggacgctgggaaagcgcacagggggaatcggtccttgaattcagcgctttaggactgtttatggcattgtctcttcgagaaaaaaatgatgtcccggtcgggctgatccagactgctgtggagggaacgccggtgaaagcatggtgtagtgaagagacaataaggcatatgggtttttatacagatgagttggaaaaatgtaaaaatgaagactatgttttatgtacgcagaaaatagaaattgaaagagaaaaatactggatgaaaaaagcggatcagtcttttgatcaaaggacagatagtttttataaaataagtattcccggtatatggaaaggaaacatgagagatttctgtggaacagttttactggaaaagaagttctttattacagaagaacaggcagttacacctgcagaaattcttatgggagcgtttacagacgctgataaaatatatataaatggaatctgctgcggtagttcttatgacagatatgcaccaaggatttatcctgtagccccaggaattctaagggcaggagaaaatgtggtctgcatacatttgtatgtattccgtggcagaggaggagcaatgccaggtaaacaatatggaatacgattcaaaaaggggaaagaaagatggcttgatttgtctggaacatgggatgcacagattagaaaacaaatggaatatctgccggaaaagacatttttcaattatatggcatcagctatgtttaatggtatgatatcaccggtaagtccttataagatatgtgctgttatttattatcaaggagaatctgatgttggacatccgaatagatatgcgttggaatttcgtgcgctggtcaatgattggagaaaatcttggaaggaaaagcaattgccgattatatacgtacagcttgctggtttttccgatggaaatattaagaaacaggggacgcaatgggcggaattcagggaagtacagcggcaggcaatggagattgaaaatacggcgatgatacaggcatatgatgtgggcgagtataatgatctccaccccatggataagaagactttgggaatgcgagctgcgcttgctgtacataaattggtttatggagaaaaggaagaatgtacaggaccgcaggtgaggaaaatcagactggacagagataaaagagtacatgctgtttttgatcagccgttgcaaaccggaagtaaaaaagacggatgtgaattagtaagtgaagttgaactcagaaaagcgaacggagattataaaagagcatatgtcacagttgatggaaatgagatttgtgcatggttgtctgatggcgaagaaccaacgggaattcgttatgcctggaaggattgtcctatgaatatatgtctgtatggaaaaaagggacttccggtcataccatttataaaggagtggggcagggatgcaatctatactggaaaaatttgtgagacatatagataatttttcaatccggaaaaaaatgatttttatctacatattctgtatgcttttgccaatcacgttgacagacggggtgatcatatatacggttctgcatacagaagcacagctgcgcagatctgaaatggaagatattgcagatgtagttaactatcagattttttatgatgtggacactgtttcaaaagtagcaaaaagtatatatgcgaatcagtatatcaatgatttcctagaaatggaatatggagatccttttgattatgtagtaagttatcagcaattttttaaagatacactgttccagagttcagatatgacaggaagttcactgataaccttgtatacagataacagtacaattgtaagcggaggtacggttagaaatctggatctgatcagagaaagcggttggtatcgggatctgaatgaaaaaggaacagaacagatgctttattttgcatatgaaccggaggtatcaggagcagtaatgcatccggaaaggcatgtctactttgttcgtaagatgaactactatggaggcggacagtcggaaaagttgcttaaaattgaaatggattacagtacgataaataaaaacctgcaaaatctgaattatgatacgcccgtatatatatgccatgagggaaaaattatattttcaaatcgtgatggcgaaaatatcggagatgagtatgaaaaattttcagattacaaagaagttgaatataagaaaacaagtaatatttacggcgctcaactggaaatatacgtgctacgtccagagacagatcttataggaaagctggtggaaaggctgcctatgctgttgctccttttttcaatcaacatctttttcccgctgatcatggtactgcttttaaaccgttcattaactgccagaatcagcagattgagcagtattttcagaaacacagaagatgaaaatctggttgagattgaaaatgtgagtgcaaaagatgaaataggtgatctgatgaggaattacaatcggatggcatcacgtataacaacgttagtaaacattgtttataaaaatcggatactggaacaggaaatgacagtggcaagacaaaaggcggagcttcttgcactgagaagtcagatcaatcctcatttcctttttaatgcacttgaaagtatacggatgcacagtgtaataagaaaagaaaaaatcacggcggaaatggttgaaaaacttgctgttatgcagagacagtatgtggattggggagaggatcttattgaggtaggtaaggagatggagattgtcaagaattacatggatcttcagcagtaccgatttggtaaaagactgtcatataggctggatgtggaaacagaatgccagcatcagaagataccgaaactgacaattgttacatttgctgaaaacgcatgtgtgcatggaatagagaaaaagacagcaccaggctggatatttattactgtgtacagagaaaatgaggaaatgtgtattgaagtagaagataccggggaaggaatgacggaaaaagagtttgacagtatgcggcgaaagatgaaaaatgcgagcatagaactactggaaaatgaaaaaggcgtaggtattattaatgcctgcctgagactgaaaatgatgtcacatgatagagtgcaatttgaattaaacggggaagagggaacgggggtgtcggttctgatacgcctgccatttatagaaagtgaaaaagggtgataagatgctgagagtactattagtagatgatgaaccatttatacttcggggaatgaaagagcttatagattggaaaaatgaaggatttgagattgtaggctcagcagctgacggagaagaggcacttctttttctgcagaatcacgatgcagatcttattcttgctgatattaaaatgccaattatggatggtcttgagttgcttcgtaagctgcgaatctctgaaaaatatagagatatttattttattattctgagcggatatgctgattttcagtatgctcaggaggcaatcaaatatgcatgcaatgactatatattgaaacccgtggagaaagaaaaacttgtacaggcacttcgcaaagtcagaggattaaaaaatatagaattggagaaagaaagagaaacaaaaaaactggaaaatgcgtatctttccgggaaacttatctctgttattcagggaagatcggatcctctgacgattgagtatgttcaacagcatattcgtttatcagaacaggtgaggtatattgaaatcctgatcgatggaaaaaattacgaggacgactatgaggattccgtaaagttagcaaatcaaaaacagctgtatagtatctgtaaggattatcttcaggatgacagtcagcattgtgtgatggatgcctccatacaggaaaaggtctatgatgttggtttcattttatgcagatatatgtatgaatcttcagatattaaagaatatttgggagattttataaagtatctgagagaaatactcggactgccagtgattatgattgtgggaaaagaggtaaaaaatctggaagaaattgcaaaatcatacagtacaacgaggatggtaagatcctctcagggattcagggaaaaaaaggaaatttattattatgaggaggaaatgcaaattcatacaaacgggatcatgctttgtaagaaaagtcttgatattctcctgaatgccattgaacagaacaatcatgcagaaattatgaaagcagttgacggattttatgaggaaatgagagagcgagggatagccggcgaggtaatgcgtcttaatattaattatcttctttttcagctgctgcatcttgcatcggagctggatgacagtgtaaatcaggaagagatattgaggatgatcagtgaagggacttttgaggctgggattctgcggggaagtaaagctcatctgtgtagggtcgcatgtgaatacggggattatttggctcaaatgcgtaaggattcctcacgaggtatattggggaaagtagaaaaagagattcgggagagatatgcggagaatctgacacttaaagaattcggtgagaaatattacctgaatggagcgtatctgggacagctatttaggaaaaaattcggacagtcgtttaaagactatctaaataattgccggatagaacaggcttgccatctgttgctgaggacagataagaaaatataccagatagcggagatggtgggataccgggatctggactattttgtgaatcgatttatctcagtgaaagggtgtacaccggcaaaattccgaaaacaggcgaagacgaaggatgaaaagaaaggggcagaagatttatcagagtgaagttctatagtttatcctgctttttggtatactttatctgatttttttcaggtagtgatccgttaaaataaagttatcaaatttaaggaggaaaattatgaaagcaaaaagagtgacgggaatgctgctggtatctgcacttgcagtatcactgtttaccggatgtggcggcggaagcagcgagaatgagggaggaataaaagaatttacagctttctttgcggttcccggggctgaaatcaatgacgacaatgagattcagcagattatcgcagaaaaaaccggtgcaaaggtggacgagacatggcttaccggtcagacagcttctgaggcggtagggacgctgattgccggaggtgagtatccagattttattgatggcggagatgcaatgggacagctctatgaggcaggagcacttgttcctttggatgattatctggatgattatccgaatatcaaggcgtattattcggatgaagagtggaataagctgagacgggatgatggtcatatttactggattcagcagtttcagaatattaagggagaagagaaggctacgacgcataatgatgaagccttttggattcagacaagagtactggagtgggcaggatatcctgaagtaaatactttggaagaatattttgatcttttggaaagctatattgaagccaatcctacaatggaagacggaacagagaatattgcttacacaattctatgtgaagactggagatattattgcctggaaaatgcaccgcagtttctggatggttatccaaatgacggatctgtgattgttgatccagatgaactgaagattattgattataatactacagatactgcaagacggtactttcagaaattgaatgaagaataccagaaaggttatgtggatcctgaatcatttacacagacttatgatgaatatattgctaaactttctacaggacgtgtgctgggaatggtcgatcagtggtggaactttgcatataatgtaaatgattccttgaaacaacagggacttgatgagaaaggatgcagttatgtgccgcttccgatcactatcgatgaaggaattaaaaatcagtggcacaattcaggaggagctctgaatgcaggatcaggacttgcaattacaacaagctgcaaagatgtggaaggagcactgcagtttatagacgatttgcttagtcaggatattcataatctgagattctggggagaagagggtgtcgattatgaagttgatgatgatggattgttttatcggacagaagaacagagaatgcaggcagcagatacggcatacaaagcatcacacctttgttcatattcttatttcccatcctataaaggtacgagtgatgatggtatcaatgcaaattggcctgatgagcaaccggatgaattttttgacagtctgaactcagccgtacagaaatgttttaaggcatatggcgttgagacatatgtggatatgctgggaacgaatgaggctcctggtccatggtatccgatgtattcattttccggtacgatgactacaagtacaccgggtggtgtggcatggacaaaaatgggagagataaaacatgaatatcttccgagagttgtcatggcagatgattttgagagtgaatggaatacatatatgaaagcctatgagggatgcaatccacaggatttccttgatgagatgcaggcggaattggatcgtagaatggaagaagcagctaaattcgaataggatataacatacaaaacgggcagatatgcgtcatgcttatctgcctgtttgaaaaatgaggtgaatctatgtctttaggaataaagagaaaaaaaacagcagtggctgaacccaaaattcattttagttggaaggaggcaaaacgacagaaatcccttctaatctggtctggaattattgtaatttatggtatcattttctactatctcccattgggcggctggctgatggcttttcagaactacagaccgattgacggactttttcactctgagtttgtcggattgcaaaagtttcagcagttgttttcagatgcgacttttttacgggtaatacgaaatacacttgcaatgggtgtgatcaatttggtggttactttcgttgctgcaattgcatttgcagtccttctcaatgaggtacgaaatacaattgggaaaaaaacagtacagacaatatcgtacctgccgcatttcctgtcatggattattgtaaccggcatcattcatgatgctttgtcaggaactggcattattaatgaattgcttgttaatttgaatgttattaatcagccgattaatttttttgctcataaagagtatttctggcctattgtcgcttttgccaacgtatggaaagaaaccggatggaatgcaattatatatctggcggcaataacagctattgatccgtcactttacgaagcggcatcaattgacggagcaggaaggtgggcgaagattaaacatgtaacacttccgggaataagacctactattatgattctgcttcttatgaatgttggaaatgtgttgaatgcagggtttgaaattcagtatctgttaggaaacgggcttgttcagagtgtatcccagacaattgacatttacgtgctgaattggggtatcagtcagggagatttttccattggtacagcagcaggtatatttaagagtgtggtaagtattgttctaattgttattgcaaatcagattgcaaaacgtaatggagacgaaagattattctaaggagggctcaagatggaaacaagaaaaaaaataaaatcatcgcccgcagataaagtgtttacagtatgcaatacaatttttatgattctgtttattattatcacactgtatccgattctgaatacgcttgctcttgcatttaatgacggaacggatgcattgcgaggcggtatatatctgataccgagaaaatggacattgaaaaactttattactgttttacagaaagacaatctgatcacaggtgcctatattactgtggcacgaacactgatcggaacgtttgcagcccttattactaatgcgatactggcatttattgtaagcagaaaaagatttttatttaaaaaacagctgtctcttttctgggttattacgatgtatgtaaatggtggtatgattccaacatttttgctgtacaaagggcttgggttaacaaacagtttctgggtatatgtgattccgggaatgattagtgcatttaatatgcttgttatacgtacatatatgaatggacttccagacagtctggaggagtcagcgcagcttgatggagcaggatacttcactatttttacgaaaatcatttctcctctgtgcaaacctgtttatgcgacagttgctctttttgtagcagtgggacagtggaattcatggtttgatgcaatgttgtacaacagaatgaatgcaaatttaacaacattgcagtatgagctgatgaaattactgtcgtctgtgacgaatcaaggggcttcggcagaggcaatgaaaaatgcaacaggttcggttactcctgagacagttcgagcagcggcgtcaatactgactatgcttccaatcatttgtatttacccgttcttacagcgatattttgttaccggacttactttaggtggcgtaaaagaataatatataggcggaggttaaaggatggacagaaaagaagccaggagaaaagcacaggaactggttatgaaaatgactatagaggagaaggcttctcagctcagatatgattcaccaggtatttccaggcttgggattccagaatacaattggtggaatgaagggttacatggagttgcgagagcgggaattgcaacagtttttccgcaggcaattggaatggccgcctcatttgatgaagatatggttcgaaaaataggagatattattgcagaagaaggcagggcaaaatataatgcggcttctaaacaagatgatagagatatctataaaggacttactttttgggctccaaatgtaaatatctttcgcgacccccgctggggcagagggcacgagacatatggagaggatccttgccttacggctactttaggcaaagcctatgtggaagggcttcagggaaatggtgagacgatgaaagcggctgcctgcgcgaaacattttgcagttcattccggtccagaggcattacgtcatgagtttaatgccgaagtatctcaaaaggatatggaagagacatatcttccagctttcaaagctcttgtagaggatgcgcatgtggaagctgttatgggagcctataattgtgtcaatggtgaaccctgttgtggcagtaagacacttataaaaaataaacttcggggtgagtggaattttgaagggcattttgtttctgattgctgggcaataagggattttcatgaaaaccatatggttacgggtacgccaatgcagtctgcagcaatggcattgaatgcagggtgtgatttgaactgtggaaatacatatctttatatccttaatgcttatcatcatggcatggttacagaggaagctattacggaggctgcagttcgtctttttacaacccgttttatgctgggactttttgatggaagtgagtatgacaaaataccatattctaaagtggaatgtagcgaacatcttttgatagcacacaaggcagcgttagaaagcattgtgcttttgaaaaacgagaatggaattcttccgttgaaagagaatgagataaaaacattaggcattattggacctaatgcagacagcagggcagctctgatcgggaattatcacggaacatcatcagaatatgtaactgtattggaaggagtcagaagatatgtgggtgatgagataaggattatttactcacagggatgcgatcttttcaaaaataaaacagaacctcttgcccaggatatggatcgcttatcagaagctgtaacggtagcacaaaatagtgacgtgattatcctgtgtcttggcctggatgagactctggaaggtgaagaaggagatacaggaaatagctatgcgtctggtgataaggaagatcttcaacttccgttgtgccagcgtagattgatggaagtggtggcgcagactggaaaaccggtgattttatgtatgatggcagggagtgacatagacttgagttttgcacagaaacattttgagggaattcttcaactctggtatccaggtgcccgtggaggaaatgctgttgcggaaatcctgttcggaaaagaatctccttcaggaaaactgcctgttactttttatgaaactttgagcgaactgccttcatttgaagattattccatgagtggaagaacataccggtatatgaaaggaaaggctcagtatcctttcgggtacggactaacttatggaaaggcggaagtccgctcagtagaagtggtggaaacggaaacaggagcaaatgttttcgtgaaggtggaaaataagggcgaaagagatatttgtgaggtattgcagatctatatcaagtgtgagaattcgatttatgcggttccgaacccgcagttatgcgggttctgcagagtaaaactttacaaggaagaaagaaaaacccttcaggtacatattcctggggaagcatttactgttgtggatgaagaaggacgtcatattgcagggggaaagcattatacaatctatgccggtttctctcagcctgatgcgaaaagcgaggaacttacgggtatgagtcctgttaaggtggagtttagaaaaaggtagattgaacttaaggatggagaaagctatgaagattaatctggacagtcctgttattgtttttttaactacagttgcagattttatgatattaaatattctgttcattttatgctgtgcgccggtcattacgatcggcccggcagtcagtgccctttacacgattactatgcgcgaggcaagacatgagggtggatatatattcaaaccttttttcaaagcatttaaaaataatttcaagcaggcgtttctcttatccatcttgtatttaataatcggagcaatttttgtttttggagtgaagttttggatagaaaagccggaattttcaacggtcaatcaggtgattctcgtgattacgggagtatttgcagttatttttattttttcacttttttatgtatttgctttaatagccagattcgataatactatttttaaaactgtgaaaaatgcagtgatgctggctgtttttaatctgagagagacatttttgctgactctgatccatgtaattgtaattgtgcttatgatttttacaaaaggtatttggatttttatgatggttggcggattttcagtctgtgcatatataaattcactgctttttataagagtattccggcaatatgaaaagatagaaggaggaaatcatgatgactaaaatggtaatcaatccgaacaggaaactgagcaggattaacagacaaatatacggtcatttttctgaacatctaggaagatgtatttatgaaggaatttatgtggggaaaaattcacctattgaaaatgtgaatggaatgagatctgatgtagttgaagcgttgaaagagattcgagttccagtgcttcgttggcctggaggatgttttgcagatgagtatcactggatggacggaataggtcctgtgggttcacgtaaaaagatgattaatacaaattggggaggcgtggtggaagacaacagtttcggaacacacgaatattttgagctctgccgtcagctcggatgccaaacgtatattaatgggaatttgggaagtggaacagttcgtgaaatgtctgagtggatagaatatatgacatttgatggaatatcccctatgtccgagctgagaggaaagaatggtcaacaagctccatggaaagttgattattttggaatcggaaatgaaaactggggatgcgggggaaacatgaacccagattattatgcaaatgagtatcgcagatatcagagttttgttcgtgactataataatgaacatcatattcaaaagatttgctgcggagcaccacacgaagattatgagtggacgaaagaggtaatggcaacctgtttccgtagaacttacgaagaacagcatggatttatggatggactttccctccactattatgtatatccagaggggattgaaatcaaaggaagctcaacggagtttgatgaaaatgtctggtataagacgttgaataaggcggtgtatatggatgaacttattcgcagacatggtaagattatggatgaatatgatcctctgaaaaaaataggcatgattgtagatgaatggggaacgtggtatacatgtgagccgggtacaaatccgggatttctttatcagcagaatacgatgcgtgatgcacttgtagcggggatcacattgaatatatttaataaacacagcgatcgtgtgaagatggcaaatcttgcacagattgttaacgtactccaggctgttctgcttactgagggggataaaatgattaagacgcctacatatcatgtctttgacatctataaagaacatcaggattcgaatcttgtggagagcagtattgagatagagatgattggggtggaagaaaagtggaaggtaccgaatctgacagaatctgtctcagaaacagcggatggaacactccatcttactataacaaatctttctgtcgatcaaagttttgatatagatactacgattattgatagaagtgtaaaaacagtaaaaggagaaattgttacggaggaaatacacgcaaaaaatacttttgaagaaccggagtgtgttacagtaaaaaaatatgatggaacacagattacggaaaagggaattcggtttacgattccggcgtgcagtgtcctgcatctggaagtgaggtagaatggttgtggggagtgagcaacatcgattatgcagaaaatgtctattaaaagatatgtctgaaaaagaattttttcacaatatgtatcgctatatttccaatcttccagaagatgataaagtttccaattcggaatatgagcgcagattgaaaaaatgcggagaatgtacgaatttgttgaatggtatatgtaggatctgcggatgctttgttgagatgcgtgcagccatatctgttaaacattgtcctaacagtgttcctaaatggtagaattttctacaagtataaaatagggtgaaatcctctagtcttacatgtcttgaaaatagtaaaaacaaaataggagtggatgtaaaaattactctactcctatttttttatttatatcggtaaaggacaactggtgatatgctctaacgtatctcggctaaatcataaagtagataaaagaaattgttgaggtactaaagtcaaataatgttgatatgaaaagatgtatcgactgaaaagtatagtgataaaaatatttttctaagatgatattcaatttatttagaaatcaaatttaaatgtttggaagtctatggtcaagtttatagtagcttgatagaggtagtggtttactctaaaggttgataagaggaatattaggatatagataagatatcattaactattttacaatcacgaataatagaaagtcatatttcaagaaagaaatgtgactttttttatagtattttgtcataagttgtcacttcacaaaggacgagatccaccaatttccaatctgagaaaaacagattggaggaaagaaaatggagcaaaaacgtccgaaaagaagaaaagataaatataatccatatactatatgccgtatgaatggaaaatattacatatgcttttataatgttcagaaagaaaaaatctgtattgaaataagtaaagaattataataaattatatatgtctttttgactatctttttatatcttcttaaatgtccgcaaagccttattttataggctctacgggcattttgattttgtggtaaacctcacatatctaggtctatcttcttatattttcgctatcaaacgtggttaaaatcgtggtaaatacttcttatgcgattagacgctgaacctctgattttgcggtatctatggacgcatgagcgtaccagttcattgtgatactgatgtttgaatgtcccatgatatactgtaaatctttcgggttcatgttcttgcttgccagccttgtgcagaacgtatggcgtagcgtatgcggtgtgatatgtggcaaggggttgttctcatggtgcttgttgtatttctttaccatacggacaaataaagtactgtaatcaatcgcaactttcggcttgcctttgtgattgacaaataagaagttgccccgtccatctatcacaaatggttctgactttgggcgtttcttcataaccctttgaaatgcctgtatcgtttctttgcttaatggtacttgccttgttccgctctttgtcttaggcgtttcaatataatagccctgttccttgctctttagtaactggtggtcgataaccacaacctcatggataaaatcaacgtccatgattgtcagtccgcacagttccgagatacgaagtcctgtctttaacagtatcagcacatcatcataatacttatgatacacgttgtccgtcttgatgaatgacagtagtgcttgttcctgttcctctgtcaatgcgactttctctttggtatcattttctaggacttcactcaacttgaaatcaaaagggtttttcctcacataatcatcttgaatggctatgtagaatgacgcttttaacgagcgtttatagttgttaatggtattgtaggaaaagcctttctctttcatgcataacgcccattccttagcgtcagagggtttgattgtatcaatgctcctagcacccaacttgtcctctttcaataaccgcatgagctgttcccgttgtttctgtgtgcttttcttcacgtttgccctctgtgtgttctgtttggcgtaaagttggcaaagcgtcattttcttgcctgtgctgtcgataccgtcctcaatatctcgtcttatctgctgttccagttctcgaagtgagggtttttcccgttttccctttggtgtcgggtctgtgggtgtcaatctccaagcatacacatattttgtgtttccaaatgcgtccacatatttatataagtatttcccgtctgttcgttggctctctccagtatgcaggatacgtcctttgttatcccgtcttttttctttcatggtgtctgctcctttccttgttggaaagagccttgatatgacttgtgttcatcataacacatacaaggctcatttgcactagatagcgtccaatttgtcaatgacctgttcaaactgtcggcgtttaatctgtatgcggttgccattcataatgagccagccagcgtccttgttttcctctgccaagcgtcttaacttgttttctccgatacggaaatacttagacgcttcttcaatggtaagggtgtatttttcccatacgggaatagcgttgttattcatcagataccccctttcccatgtttcgtatcatattggatataaggaataaggtcggtgcggtctatcctctgtaaatgagcggtcagtttgctggaaagagaagtgctgtatcttgccttgtcaagcatagttcccactcgttccaatccacctaatgcgtcatgttcttccaagaagtaaaaacttttgacagcggaaataacgccaccctctgtgagccattgctgtgtttcttcaagggaattatgcagtttgggtacttgcagtttcaagacttccacagcccctaaaaagcgttcccaaaaccgatacgttttccacctgctcttattactctcatttctgtttgctacgacaaagcgtaggttgtttgccaatagtccgaaagccagttccccaagttccagcggtctgtccttaaatgtcatggcaaaggcatgagccttatcatcacgcagttgcatttctgtccgtttccaactgccgacttcatcaagcgtcttattatattttgaacagacttccttatccttgtcataaaagcggtaggacaatcccgattttccagcaccgatataaacagtttttgcggtgtcgaaatcgtcaaacttgctttcatcaaagtggtagcttcactattggagataaattcctctttttcgcattttttctttatctgctctatggtaaagaatggcttttcgttcttatcatcaatggcaatatcaagccttgtgaagtggaagttatccagtccgtatcttctttcacaatgtttgaacatatccccaaaggtataattcctactgtcaagaatacggaaaatatcatcacaacctctgccagtcataacgagataacagcctaacccttgtggggtgtcctctgtctttcttgcgtcgcccgatacataaatatctccaatctgccagcgtgcttgataagtcttaaatttaacagttgccggatagacattaaaaatgtcagtcggtaaacctaaaatgtgcatgataacatcttctgcggttgcagtatcaaatacaatgctgatgtaatcaatcttaacggataaattttcgtgtgttgcgatacttcattactcctttcgtatgccccgattttttgcggggtataaattgcatctttctctttatttatcacagtttctaggtactatgacatgtatacgcagggcggtgttacttgaagaagagaaagacaaagaaatcattcccaaatggaaaaatgcgaatggatcacttgttgatttctgtaggttaaggccttaacaaaatccaaacctttctagcaaaaaatccttcaattataagcagcagctggaaaggtttggattttatttaagtttggatactcgtggaaatccaaacgtttggatttccacgacaagacattttaccgttatggaacaaaacatcaggagtgcacccagcatgactgccgttatctgatcggcagcgagcagaatgagccgcaactggaatggaacaaggagatgcacggattgttccaggagatgctgcattaccgaaatgggttgggggagaaagaacttgatccgataattgttgagggattcgaaaaaaggtatgacgaaatcctgaacaaggcggagaaagaatatcaggatgagccgccgactgagtattatagggaagggtataatctgtttctccggttaagggaatataaagaaaatgaattattgttcctgcatgataaacgggttccagccaataattccctatgtgaaagattggcaagagtctataaacgaaaacagaagcaggcaattactctgcgaagccaagaaagtttaaacgatatttgtgatggcttgagcatagtctatttgttacgctcacaaaatgtagatgtatatcagaagatatcagaaatatatgaacggaaacgcccgccaaaaataaaacaggaaaaggttgttgctaaagcttaatgccaaagcagcaaccttttctttattatacagatggcgtgggtgtgaaaagtaactatcagatgaagcaatgtggtgtataatgaggtggcagaggatgaaaaacagggtaaagagggaatgaatatgaatccggtaattgtaagaaatgtcaggataggcgaggggatgccgaagatctgtgtcccggtcgtgggaagaacgagggcagagatcagggaagcggcggcttatgtggagctgaaccggagaatgtccggggcgggatatattgatatggtggatgtggagatgttttcaggagatgatacggtgtcggcgcttgtacggtgtgcccatgcctgtcaggtgaaggtggtgggctctaaccatgattttcagaagacgccggcgaaggaggagattgtggcgagacttcgcaggatgcaggaactggatgcggatatcctgaagattgcggttatgctgcgaagtaagaaggatgtgctgacactgcttgcggcgacggaggagatgtgctccgaatatgccaaccgcccggtgatcaccatgtccatggacgggatgggggttatcagcagattgtgcggggaggcgttcggttctgcggtgacgttcggatcggcagggaaggcgtcggcgccggggcaggtggaagcaggagagctcaggcgtgtgtttacgcttctgcatgctatagtataagccgcaagaggcttttttcctttaatttctcttgtatttttctatagtttgtgaggttttccagaccggtatgcatgatataataaacagagtatacggggcctttgtagcaatattaagagatgaggaggtttatatggtcaggataaaaggtaaaaagtttctggcaattgcaattgccggagcagtgtttgtcggcggtgtgttcccggaaacagcctgcgccgcagaaacagcggaaagcacaagtgatgtacaagtggaagaaacgaagcagcagagcgtaaaaagcattcaggagaatctccttgaagcttataatacaggttttgaaagctctgacagtaatggcttatactggtggagtgacggaaactggggaaaggaaaatattgcacagaaagcatatgagggagatcaaaagccggcggaagacagcggaggttattatgtggaagtgacgccggacggtgaaggaatcggtacggcacagatatgtgccggagatatcgcatctattctggaaccagaggtatcctatgagttctctttctatgcaaaagcagacccccaaacgccggagggaacggtggagctgcagattacaagtgcaagttcggattgggcttcttcacaggcagcagcggtaacttatgacagcaaagttatattggatgaaaactggcagtccatcagcggtacattcattattccggcacatgagaagcatgaacaggtgaagattgaatttaaaggcagcaaagatctgactttttatgtagacgatcttaaaataggaggaaaaaaggcagaagtgaatcaaggggataaccttgtgaaaaatccgggttttgcagatgaggatctgtctgtttggaaaaaaggctcgggcggggcagcgattacgtcagagacatccggtgaagctataccagacggcattgccacgtatggtgcaattggaaacaggacaagcagccaggagtgttttgcgcaggatatgacagggattttgcagtcagggaaaacctatgaatattctttttgggtgaagcttgacggggaagactacagggacgcgccggcagaccaaagagaaatatcttttgcgccatatgtatctgtaggcagtaaccagacatattgggattcttattcttcggggattctggacgataactgtgtcagacagattgaggccggagtgtggacgaagtttaacggaatctttaaaccacagtttgaaggagaggcagaggagctggtgattcgtatcctggaacagggaacgaattatggaagcggcgactgtgtaaagggcagatactatgtaacaggtgttgagatgcgggaaaaggtggaagaacagaaggaaatagaatcagatattcctgatttgaaatccgtagtgtcaagtgcggatggattgggagcagatgcttatacaggtacatgtattgtcaatggacatttatctgacggcacacttatgaaactggttgaaaagcattttaatgcagtgacttttgaaaatgaactgaagatggatgctgtgttcggctatcagaatgacgcgcctcctgagatggaatctgttacctggacgcgcgcagacggaacagtaatgagcggatatcaggttccgaagatggattttacacttgcggagaagatacttgctgttataaaggactggaatgataagaatccggagtctgcaattaagatcaggggccatgtgcttgtatggcattcccaggcgccggagtggtttttccacgaagactggaacaaggataagccgtatgcatccaaagaggttatggatgcccgccaggaatggtacatacagagcgtgctgaatcatttccttggcaaggatagtccatataaggatatgttttatggctgggacgtagtgaatgaggcggtcagcgacagcaccggcacctaccggaaggaggatgagaaatccagctggtggaaggcttatggggatcaggactttattatcaacgccttccgttacgccaatcattatgcgccgaaaggactggaactctattacaatgattataatgaatgctcaggcaataaggtagatggtatcgcgaagcttcttacagaggtcaaatcgcatgagaaggatgccgatcttccgaccagaattaccggtatgggcatgcaggcacactatgatatggccggacctacggcgaaccagattaagaatgcggccgtcacctatggaaaaatcgtgggtaaggttcagtttacagaactggatcttaagtcgagcaatgaatatgatggaacggatgccacacgggccggtgagtatacgaagcaggcatatcgttataaagagatctatgatgtgctgaaggaagtagatgccatggatggtattgacatcaatggtatgacagtatggggtgtgattgacaaatattcctggctgcaggacagcaactccgcgggagggggttcggatggttccaagaaacacgtgcctcttttgttcgatgatgattacaaagcaaaacccgcgttttacgcgtttgcagacgataccagacttgagccttatatcaataatgttgtagtaatgcaggctctcgggggagatgatccgtatgcaaagagtaagacctatcagataagcggtatagacgatgtagatgcttccttccagatcgtatgggaagagaatcaaatgaagataaaagtaacggttaaggatgaaacagaagatggaagcgacggcgccgacctgtatctggactggacgaaaggttctgacgggactgcaaaaccggagaagatgacaatcatgcgcagtgacgcccagaagatagacggaggttatattgccgagttcacggtgggcagagaactaaaagcagccgacaggtttgcgtttgatgtggttgttacggatggagagaagaaggcggcgtttaatgataagaagatgtcacaggaggatagcagccggtattttgcagttgccatgacaaagccttatatgaccgtaagcaatggcacgattgccatagatggagaagaagatgcattgtgggggaaggtcgccgcggtacctcttacaattgtcacgggagttccggaagcttcggcggcaggaaagttattgtgggataaggattatctgtatctgtggatggaagtaaaggattcttctctggataagtcttccgaagcagcgcacgtgcaggattctgtggagatatttatagacgagaataaccataagacagacggctatgaagaggatgacaagcagtatcgtattaattatgagaatgagccgagctttaacggtcaaaaatgcatagcagataacctgatctcacagacaagaaagacagaagacggatatattgtggaggctgcctgcaaatggacggatataacgccggaggcaggaacagagattggttttgacatgcagatcaatgacggaaaaggcgggacacgtatcggtacggtaagctggtatgatgaatccggacaggggtggtcctcaccgggagtattcggcacgattcttttgttagacaatagcacgcagaagccgggcagtacagggaaagtagaagggaatacttcacagccggggaacaatgcaacgaaggctccaaggacaggagatgagaacagactgggactatggtctgcattgctggccatttcctgcggtgcggcgggaaccgtggtttaccgtagaaaaagaagactaactattaaagaaagtcaataaatagtttcaaaaacagagatgttttgagtatagtggcgatgacttattcatcgcaatcagtaccttgaaaattgcatgacaaatagagcatcgagtatgatgctctgacaagaagatatgatgttggaagaattagattgctttttggtattgctgtccagtgcgttcgagatgataaattagccgaactagtttcttggtcgcgtgagacatttgaagtgctataataaagttgtaacagaagtggctaataagatataatcatcttacagagaaaagaggaagtattatgtcacaaagttacacacctgaatttaaaaagaaaatcgttcgccttcatatcgaagagggacgtacttacaaaagcatcactgcagagtatggtgtatcaaaagccagtatctccaaatggtgtgctgaatttagcgaagaatgccatacaaaagcccagcagaatccagatgctcctaatgatctggaacttatgaaagaaaacctccgtctccgtaaggaattggaagaagcaaaaaaggagaatctcttcttaaaaaaagcagcggcattcttcgcaaaggaaatcgattagaggcttatcgatttattgaccaatatcatgagacattcggtatccgctggctgcttagacggctgaaaatttatccgaacgcttactataactaccggaaacaccggaaggcggattatcacgcccataaagcagaagtccaggcacagattcatgaaatctatcatgaacacaatggtgtcgatggttacaggagcatgacagtctatctggcacgtaagggatatcactacagccctgcaaccatacataagtacatgaatgcggagttgggactgagatccatcgttcgtccccaaaaaacagattatgaacagggaaaaccacacaaggtgtttgaaaacaaacttcagcagaattttatgtcggataaaatcaatcaaaaatggtgcacagatttcacatacttatttttgaagaaccatgatgtgagatacaattgcagtattattgatcttcatgatagaagtgtcattgccagcataacggatcggcacatcaccagtgatcttgccatccgcactctacagaaagcattggattctcagccagctatcaaaggagaattgatcctgcattccgatcagggctcacagtatacatctaaggcatttactgatttttgcaagtcagtgaatgtgacgcagagtatgagcaaagcaggttatccctatgacaatgcaccgatggagcgttacttcaatacactgaagaatgaatgcacaaatctgtatgagttcaaaacagaggaagaactctaccaagcagtggaggaattttcctatgtccactacaatcatgtacgcccgcatagctccaacggttaccgtacgccatatcaggcacgaatcgcaggataaaaaagggctgcccgagcagattgcttgattactcaaaatcggaacggttagcttttgtcaagggcaaagctgcgacagcggtgtgaaacacccttgatgaaatctgacagttccgatagattccaaactgcaatccaccgattttattagccataagtgttacaaaaatgcttgaccacaacaaaaataaagatgtattagaagaattttgaacaaaattccctgtatcaggttttggaggagcaatatcatattcagattaccacgacttctttgaaattaaaagctgtctctgcatacggaaatatctcccgatttattgatgtaaagcgattactgctgtacaaatcgaaaaagtggagttaaaattttgtgaaagaattagaaatagaagaatgaggaaagaggatgcttatatggcatccatgcagagttttgcaatgagagcaagctttcaacttccagttgaaattgttctggaaggggaccggccagtgaagtcggagacatttatgatttgaatgtgggtactgatagacaatgcccctatgtcggagaagacaaaagaccaattagtatgtatgttgatgatgagcggttttgtgattttattttgagggataaaagggtatagagagaaaaagaaaacagaagaataaataaaaaaggatagccgaagtattcagatttcacttttgaagacataaaaagtgaaatctttttttacttttaacccaaattttatataaatgtgatattggattatacgaggcagaggtaatctataaaagaacattgcgcagattgtttgtgcgatggaataaaaacaaagatgtgaagaggtcttttatgaaaaaaacatatgtacttgatacaaatgtgctgattcaggcaccctatgcggtcgaatgttttgaggaaaatacagtggtacttccgatgacagtgttagaagagttggataacatgaaaaaagaagagggagaaaaaggtgccaatgtacgcaaagtgattcggattttggacgcacacagagaaaaaggaaatttgctggaaggggtgcgtatggaatggggagggattctgcgtgtagaaaaaaattaccggaacgttgaattgcctccggatcttccggaacataaatctgataatcgcattctgaaagtttgtgtagggctgtcaaatgatctgaaagaacaggtgattctggtgacaaaagatattcttttgcgtatcaaagcacagttgcttggaattcaggcagaggactttgggacagagcaggttgcggtacatgaggagcagtatttggggaggagagaggtgtttgtaccagaagaattgtttaaagattttaagaaaaagggagttccggtagaatgtgtatattgctgtgatatgagcgggaatcacacttgcccggaattgtttgaaaacgaatttattctgttaaaagcggatcagtcttcgaaaaagactcagttggggcgggttgagaaagggatgatccgaaagcttgattatagaaaagctgctccatatggagttagtccaaggaatgtaggacagtattttttacaggaagcattgatgcagtctgcagagaaagctccgcttgtcattgtaaaaggaatggcagggacgagcaaaactttttattcactggcagtgggactggaaaaattgttaaacaatccatctggagaatatcggaggatcctgatctgtcgtccgaatgctttatttgattctgacattggatttcttccaggtgatgagcaggaaaagatttctcctttgatgcgtccgattatggataatctggaacaattggtagattccagtgatcgtgagcgatattcaaatgagcaggaattgaatgataaaatacaggaaatttttgacagaggaatcatccagacagaggctctgacctttatcagaggaagatccattatgaaaacatatttgatcatagacgaagcgcaaaatatgacaccggcacagattaagggaattattacgcgtgccggaaaagaaacaaaaataattttattgggagatccaaatcagatagacagaccttatttggatgaaagaaccaatggattgagttatgctgcagagcatatgaagggaagtccgttatgctggcaggttactttgttgccggaagaatgtgaaagatccgtgttggcaacggatgctatccgccgtttgtagaagaaaagcgagtaaaaaacatagaaaggaactgtttagatgaaagaagcagagaaaaaaataaagaaaagtccatatatgatgaatcgggaattatcctggttgaagtttaatgagagagtattgaatgaggcgggaaatccgaaagtcccacttgcagagaggttgacttttgtatcgatataccagtcaaatttagacgaattctatcgagttcgagtaggaacgttgatggatcaaatggatgtatcagaagttgttcgtgagaataaaaccaatatgacaagtgaagagcaagtgaaagcaattataagggcaacacgagagctagaggagaaaaagacggttatttatgaacaattgatgggggaactggagccgaaaggaattcgtttgatcaattttaataagctgtctgcagaagaaggaaaaattttggaggaatattttgacagggaaattgcaccctacttatcagcgaatatcgtaagcaaacagcagccctttccttttttaaagaataaggatatctatgctgttgctcttttggagtcgaagggtgggaagacgagaactgcaatcattccatgcagcaacaatgtgttccgcagattgatcgatattccaactcgaaagggaacctttctgcttgcagaagaattaattctgcaatttcttccgaaattctttaaaaattatagtgtgaaagaaaaatctttgattcgtgtcacaagaaatgcagatattgacacagagatgatttatgacgaggatctggattacagagatgcgatggaaaatttaatcaaagagagaaagcggatgaacccggtcaggatggaatttaccggaactctgaataaaaaaatgatgcatgcgttatgcaaaacgatccacgtggaaaaggaacatgtatttaggtcggaagtcccattggatctgtcatttgtctttgctattcagagctatctgaaaaatacaaatgcaggggagttgttttatccaagacgaaccccaaggccaacccctcagttgaatgataaggaatctttgattccgcagattctggaaaaagatgtgcttttatcttatccgtttgaaagtatgaaatcctttatcaatctgctatatgaagcagcggaggataagtcggttgtatcgattaaaatgacgttgtaccgtttggcaaataaaagccagattgtagatgcactggtggaagccgcagaaaatggaaaagaagttgttgtactggtagaacttcgcgcccgctttgatgaagaaaataatattgaatattccagaaaattggaggaggccggctgtcgtgtgatttatggattaaacgggtataaagtacattcaaaattatgcctgatttccagaaaaacagagcaaggagtgtcctatgtgacacagatcggaactggaaattataatgaaaaaacatctgcgctgtatacggatctgtcattgattacaggaaatcaagaaatcggaaaagaggctgctgaagtgtttgcagcactgttaagaggagaaacagtggaagaaacccatcttttattagtagcaccaaaatgtttgcagaataaagtgttggatatgatagaagaagaaattcaacatgtgaaaaatggagaagaaggatacatcggaattaaaatcaattctttgacagacaaggtgatcattagcaaattagtcgaagcgtctcaggcaggcgtaaagattgaaatgattgtcagaggaatctgctgtctgattccaggtgtcaaagggtatacagaaaacataactgtgataagtattgtagggcgtttcctggaacattctcgaatttatcgatttggaacgaaagaaagagagaatgtgtatattgcctcagcagattttatgacacgaaatacgcttcgtcgtgtggaggtggctgccccggttctggatgaacgattaaaaaatcagctggactggatgtttgaaacgatgatgaaggatgatgaaaaaggaaaatgtctgacggaaaaaggaatctatgtggatcgaaatcttcatgtacagaaattgaattcccaggagtgcttttatgaggctgcttatgcaaatgcggaaaaaagacagaaatagcagaaaaattttcagacggaaaaatggaattggagaaggcgaaagaattgaattacaaagagatattacaaaatgaggaagtaaaagcgtatttggagaagggcaacgaaaatctcggaattcttgggtataccgatcattccgaaaaacattgtgcaatagttgcaaaacgtgcagggatgattttgtcaaaatttggatatacagaacatgagattgaacttgcagagattgcaggggctatgcatgacattgggaatgtgatcaatcgaaagaatcatggagaatatggggcaattctggcatgttcaatcttggaaaggttgaaaatgccgctgagagacagaatccttgttatgtcagcgattggaaatcatgatgaatctacaggggaggccatcgatgcaatatcagctgcgttgattcttgcggataagacagatgtcaggagaaatcgtgtaagaaataaagaaaaagcaagttttgataagcacgatcgtgtgaattatgcagtgacaagtgcggctgtaaaagtgaatgcgcagaagcatctgatcgcattgaatttacagattgacgaggagatttgtacaatgtatgaatattttgaaatttttctcggcaggatgatgatgtgtaggaaagcggcagaagtactgggagccaggtttaaattaaccgcaaacggaagcaaagtattataggcatggaggaaaaatagaaaaagcagtcggtcagtttgcaagaacagaagcagagataaaagagtttgcaaaatagagtaactctcctgaaagaaaatatggtatagtaaaaagaaaaacggatacatggagagaaaatatgaaaacgattatcataggaattgcaggtggaaccggttcaggaaaatctacatttacgagaaaattaaagaaagaatttaaagaggatgtagcagttttatatcatgacaattattacagggatcagagtgacatcccgttagaagagcgaagaaagacaaattatgatcatccggatgcaatggagacagagcttttgatccggcagttgatggacctgaaagcaggaaaggcagtagattgtccggtatacgattatacacagcatacaagatcggatcaggttgtgagggtggaaccgaaaaaagtaattcttctggaagggattcttgttctggcagatgagcgtctgagagatttgttggacatcaaggtttatgtggaggcagatgcggatgaacgaatcctgcgtcggatcatccgcgatgtcaaggagaggggacgtgatatggaaggtgttgtggagcagtatctgacaacagtaaaaccgatgcattatttatatgtagagccgacgagatgtatggcagatattgtgatcaacagcggaaagaatccggtggcatttacactggtaaaaaacaccatacaaaaaatattggatgaggcagagtaactgcagatatccggacaggctgtaatagaaaggatgagattgtgcaaaagagtataaacaaattgcgaattctgacaccggaaaaatttcaggcggagtatccgcatatttttaaaagaaattttggtgaaattgcgttgaacagagtgcatttctgtaaggcagaatgtctgcgtcaggcagtcacaggaacatttgcgattccaagaaaaacaaagctgacaggagataagatcacgtttgggtactgtattgcagaggaacagctgatctttattgaaaatcaggatcatatcaaaatagagatgaaaaaagtccgggaatatcaggatgaagagcgtacttcgccattgttgcttttgtttgactggatggagtatcttatcaaagatgacatgctgtttctgcaggattatgaagaaaagctttcccatctggaagaggaactgctggagggaaatatggaagattttgacagaaaaatcctgttatccagaaaggaactttctgtgctgagtgcgtattatgaacagttatcggatatgggggaaactcttcagcaaaatgcagcgagacatcaaacagaacaggaagcattgctttttgggcttttctgtgagaaggcaggacgattgtatgacatggtgcagacactccaagagtattccatgcagcttagagaaatgcatcagacgcagatcgatatccggcagaatgaaattatgaaagtgctgacgattgttacaacgctttttatgccgttgacgctgattgcaggatggtacggaatgaattttgcacatatgcccgaactgactgcaccgggagggtacgggatcatctgtgttgtgtgtctgcttcttattgcagtggaaatctggatttttaaaaagaaaggatggtttaagtagtcatcatttccaataacgcagccccttcagtcacaccgttatgatcgcagtccggaagcatatgatcggcttcttttttcagaatctcaacggcattgcccatggcaaacttcatttcggaagcctcaaacatactcagatcattttctcagtccccgatgcaggcaatctcagattttgcaataccaagtgattgggccagatgcgtcagagcgcccctttggagggttctgatgaaaagatctctgcatactgaccggtgtaggcagcacgaagagacggggagtttgcaagatgcattttgagctgcggcatggagtttttggaaaaaagtaaaattgcagttctttcacatcacatgaaagctcctggattgtctgttccatattttggacataacggacttttttggcatcttttccttagatcagacgtcccagaaaaacaaggctgtgaatttatggagattattatttatagtgtaacaccttcaaatcgatacgaaaagacttctaaaaaattttttcccacataaaattagaaaaaatatagtaattctatcagatttatagtatacttaaaacatactgaaaaagtaggaattataaagaatgagggaaaggatgaaaacgatgaaaaagattttaaaaagtctgccgtttcagcttcttttgggagtgatcatcggaattgtgctggggctgatttcaaatgaagcggtcatgaatgtgatcgtcacgatcaagtttgtattaggagaactgattaatttctgtgtaccgctgattgtgatcgggtttattgcgccatcgatcacgaagctcgggaaaaatgcgtcaaggatattaggagtggctgttcttcttgcttatgtatcctccgttttagcggcgctgggatcaatggcagcaggatatggactgattccgcatttgtcaattgtttcggaagtagatgggctgaaagaacttccggaaattgtatttcagctggaaattccgcagatcatgtccgtgatgagtgcccttgcattttccattctgatcgggcttgcggcaacatggacaagagcagagacagtgatccggctattagatgaatttcaacagatcgtactgatgatcgtatccaagattgtcattccgatccttccggtctttatcgcacttacattctggtctctggcatacgaaggaacgattacaaaacagctgccggtatttctcaaggttgtgctgatcgtaatgataggacattttatctggatgactgttttatatacagtgggtggaatttactccggaaacaatccgtggaaagttgtaaagcattatggtccggcatacattactgcagtgggaacgatgtcctctgctgcaacgcttgcagtggctttaaaatgtgccagaaagtcggagccggtactgagggatgatatggtaagctttggaatccctctgtttgcgaatattcatctttgcggttccgtcctgacagaagtattttttgtgatgacagtctcccaaattttatatggaaaactgccgtcagtcggaaccatgatcttattttgtgcactgcttggcgtgtttgcaatcggagcacctggggttccaggcggaacggtgatggcttctctgggtcttatcacgggagttcttggatttgatgccacaggaacagcactgatgctgacaatctttgcattgcaggacagctttggtaccgcatgcaatgtgacaggcgacggtgcactgactatgattctgaccggatatgcgagacggcataatatcgagcagcagacagaaacgattgaattttaagaatcgtggataaaaagggcagggacatattgcgtaacaggcgatatgtccctgctttttagcgttcttctactttacaacagaagaggagactcctataataaagtcaaaagaaaatccacaggagcagaacttatgacgataaaggaaattgcaaagcttgcgcaggtatccagtgcagcagtgtcgagatatatgaacgggggatacgtaagtgaagaaaagaaggagaggattcgggcagtgatcgaagaaacaggataccgcccgtctgtacaggcgagaacgcttcgcaccaaacgagcgtgcctggtcggagtgattgttccaaagatcaattcagagtcgatcagcaggattacagagggaatcggtcaggtactttcagaaagagcctatcagatgcttctgaccatcacagataacgatccgtccaaagagctggaatacatggatttgtttgaatcttatccggtggacggaatcattctggtaggaacagtcctttccggtgcgcacaaggaaaaactgaaaaagtgcagagtgccgatcgtcgtgatcggacagcagacaaacgaggtcagctgtatttaccatgatgattatggggctgcaaaagaactggcagaacagatcggaaaagaaatgtccggacgtattgcttatatcggtgtgacaagagcggataaggcggcaggtgcagccagagaagacggcttccgggatggtctgagagcagttggcagagagctggaggaaggatgtctgcgccgggcaagcttcacaatggagtccggatatgagcaggcatgtgatcttttgagattagagagtgatatcgatatcatatcttgcgccacagataccattgctgcaggagtgatcgaagcaattgcacagctttcgcctcaaaggagtattcaggtgacaggatttggggacaatcagtttctgaaagcggttacgggcggaatcagaaccgtgcatttcgggtaccagacaagtggtgtaaaaggcgccagattgctgctggatatggtagaatcaggaaagacactcacgacagagattaagcttggatatgaactgctgtaaaacagaaatctagcaaaatatacaaaaaaaataaaatataaattagtaaaaatgccatctttacaaatggcatttttttcactattataatcttacaagatatgaaatcgattacatgaaacgtgagtcttgcaaagaaaaaagaaagggatgaaggtatggattacaaaaaaaccgcacaggaaattttgaatcatgttggtgggagcaagaacatcatttcagcggcacattgtgcgaccagactgcgcctggttattgcagataacaagaaggcagacaaaggtgcgctggagaatgtagatggagtcaaaggagtgtttgaggcatcaggacagcttcagatcattctggggacaggtacggtcaacaaggtgtttgatcagtttattgagattgcaggagtgacagcaagctccaaggcagaagcaaaagaggcagcggtacagaagcagaactggtttatgcgggcaatcaagcttctgggagatatttttgttccgatcattcctgccattgtggcaagtggatttttgatgggaatcatgaactctcttgattttatgaatacgaacaattttattcatattgacacgaccagttcactgtatgtatttgcgaatctgttcagtaatacagcgtatacctttttacagattctgattgctttttcagctgcaaaagcgtttggtgcgaatccatacctgggagctgtaatcggaatgatcacaattaacccggcgctgcagaatgcgtatactgtggcgacagaaggtgtgaaagcaacgcagtcggtattctttggactctatcagattgatatggttggatatcagggacatatcattccgattatcattgccgtatggctgatgtctgtgattgagaaaaagctgcacaaggttgttccggaggtactggatctgttcgtaacacctctggtaagtgtatttgtgacagggtatctgacactggcagctatcggtccggtctttgtatgggcggagaatgcgatcctgaactgtatccagtggcttctgatacttcctctgggattgggaagtctcgtaatgggaggtctgtatgcaccgaccgtagtgacaggaatccatcagatgtatgcagcgattgacctgggacagcttgcacagtatggagtgacttactggcttcctctggcaagtgcggcaaacgtggcacagggagcagcagcacttgcagttgcagtaaaatcaaaagataagaagatcaaagcgctggcacttccatcatctttaagtgcatttatgggaattacagagccggcgatctttggagtgaacttaagatttttcaagccgttcatcgcaggatgtatcggtggaggatgcggtgcactctatgcatcaatcgtacaccttggagcaaaaggaaccggagtgacaggtatttttggtatccttctgtgcctgaatcagccggtacagtatctggtcgagatggcgatcgcagtcggagttgcctttgcggtatcctttatcctttataaagataaaaaggaagaaataaaagagcaggcagaagcagtgattccggcagaagagctttcggtttcacaggcagagactgtcacagaggagacgctgggaagtcctgtttctggaaaagttgttccgacatctgagatttccgatgccacatttgcggaggagatcctgggaacaaccgttgctgtagagccggaagcagcggagcttgtagccccttgtgacggtacgattctaagtatttatgatacggggcatgcagtttgtatgaccacaccatccggtggagaacttttgatccatgcaggaattgataccgtaaagatggaaggcagaggatttacaaagtgtgtggcagacggagattatgttcatgcgggagatgtacttcttaagatggatctggatgcgatccgaaaagagggatacgagacaacaacgatgatgattcttaccaatgcagatgactatgatgtggaaaaggtttctgcagatcatgtcagctgtggagaaaaaatgatggtacttcataaaaaatacgaggagatagagatatgaatgcattgacaagagatctggaaggtttaacaaagtcggcagaagcgtgtgcagacggcaaagaccgtttccgccagaagctgcatctgatgccgccgacaggatggctcaatgatcccaacggactgtgtcagttcaaaggaatctaccacgcattttttcaatattcgccatttaatgcaacgggtggtctgaagatgtggggacactatacaagccgggatatgatcgaatggaaatacgagggtgtcagcctgtatccggatcagccgtttgactgccatggcgtgtattcgggatcagcgtttattgaagacggaaagatgtacctgtattataccggaaatgtgaagcttgaggacggagaatttgactatatccgaaccggccgggaggcaaacacagttctggtggtcagcgaggacggagagcattttggcagaaaaagagaactgatgagaaacagtgattatccgcaggatctgacctgccatgtacgtgatccgaaagtctggaaagaaaacggcatgtattacatggtgcagggagccagaacgcagaaagatgaaggaaaagtgctgatttttgagtctgaggatcagctgaactggatctacaaaagcgatgtaaagacagcagagcgatttggatatatgtgggagtgcccagactattttgaaacagaaggcagaaagattttatcgacttccgtgcaggggctggaaggcggcgtgtgggatgcacgaaatgtgtaccagtccggatattttctggtagagggggatatcctttccgagtatgtgctttctgactatgaactctgggactatggatttgattattatgcaccgcagagttttgaaagtgaggatggacgccggatccacatcagttggatgggaatgccggattgtgaggaatacacaaacctgacgctggaagatggatggcagcactgctttacatttccaagagaagtgcatgtcaaagataaaaaagtgcttcagcagccggtaaaagaactggaagcactgcgcagaggagaagaaagagcagtctctgttctggagaagaaaggtacaaaagtctttgaggcagaggtgcagaatatcacaggaaatcacttccgcgcagtactggcaaaagaactggttctggaatatgtaaacggaagatttgagatgaagtttacaagccaggataagacgtccgtatccgcgggaagaagtcttagattccgggaagtaagtgaagtcagaaacgtccggattcttgcagatgtttcttctgtagaagtgtttgtcaatgatggagagactgtgttttctacaaggtattatccgcaggattatgaaataaaaatagaagctttggatgccaagattgcattctgggagctgtaaaagcaaaaatgttcccatcgggattttctgatgggaacatttttgttatgtaagaaagactgtcaaatgtacaaatcagtttgcatcttctttgtctttgggcagtacaatgttgaggagtactgcaagcaatgtagccactacaactggtgatttgccgaagatcatcacaaaccagtccgggaagctggcaagagaatcacttgcctgtgagattcccattcccagtgctgccgcaagtcccacgatggaagtattgcgaaacgtcatattttgtgatgtgatcagtttcattccggtcatggcgatggatgcgaaaacagacactgtggcaccgccgagtacacaatacggaattgtcgttaaaagagacgagaatttcgggatcactccggctatcaacagaatcagtgccgcaccgccgagtacacagcggttgataacttttgtcgttgcaacgattcccacgttctggctgtatgtagcagtcgggagtccgccgagaagagaaaatagaatattggagattccatatcctacgattcctccctgcagttcctgatctgttggcatacgattcattcctccgctggttgtggcggaaaagtcgccgattgcctgaatggagttgattgcaaacagaagaccgattgcgacacaggcggaaggttcgaagcgaattccgaaatgaagcgggcttggcacctggaagagggcagcatcatggataggagaaaagtctaccattccgaagaacagtgcgatgatatatccaccgatgataccgatcagaatggatgccagtttccagattccttttccaaaatgattcaataccgttacaatagtcaatgtcaaaatagcgaccagccaattttgccaggaaccataatcttcgctgcctacccctccggccatatagttaatggcagtcggatacagagaaagtccaattgtaaatacaacggttccagtgatcagaggcgggaaaaatttgcggatcttccggataaaaagtcccacaaaaacagccacgataccacctgcgatcatagcacctaaaatggtggcgacatcatactcttcggcaatggactgcatactcggaacataggcaaagctgatgcccatgatgaccggaaggccggatccgattgtaagataccgggtcttgataaatggaaacagttgtaacaatgtggcaagtgcggaagtgaccaaggcagcctgaattaaaataacagagtcagcttccgaaagtccggctacaccggatacaatgatggcaggtgttacacagcccacgatcattgcgacaacatgctgaagtgcaagtggaaatgcctgattgaaagcaggtactccatgcagatcaaaaatagtagagcgggttgtctgatgtttcataagtaaggtgtccccctttatttgagatggatcctggtgcctgtaagaccctggattccttctctggctttttctagtaatgtgatcaaagacttccttccgggtgctgattctgcaaattccacggccgcctgcatctttggaagcatggagccgggtgcaaaatgtccttctttaatatactgttttgcttcatctaccgtgatatcatccagccatttctggtccggagttccgaaatgaatggcggctttttctactgcagtgaggatgatcagaaaatctgcatccagttcttttgcaagcagagcactggcgaaatctttgtctatgactgcactggcaccttttaaatgattgccctgacggatcaccggaatgcccccgcctccgcaggcaatgacaagatcaccggaatccaccatggtccggatggttccgatttcaatgatctcctgtggttttggagaagctaccacacggcggtaacctcttccggcatcttctttcataatgtagtcatatttctgcgacatttcttctgcctgttcttctgtaagaaaacgtccgatcggtttggacggacaggcaaaagcaggatcatgttcatcaacccgtacttgtgtgatcatggttgcaacaggaatatctgtaatattgcgattcagaagctcttctcttaaagcattctgaagatcataaccgatataagcctggctcatggcaacacagacagatagaggggtattgggctgctgtgcgtcttcgtgagtcagagcgagcattgcgttgttgaccataccgacctgagggccgtttccgtgtgcgacaacaacttcacatccttcctcgatcagatcgacgatggcgcgggctgtgatcttgacagcggccatctgctccggaagggtgttgcccagggcgtttccgcccagggcaatgacaattcgtttttttcttgccatttttattcctccccgactgatgcgattgtttctacctcacataaaactccttttggaagatcttttacagcaacgcaggagcgtgccggttttcctgtaaaatattttgcatagatttcattgaatgcagcaaaatcacccatgtctgcaaggaaacaggttgtttttaccacatctgtaaaatccgcattctggctttcaagaagcgctttgatgtttaacatcacctgttctgtttgttcttcgatcgtggttccgaccacttctcctgttatcggagagagcgggatctgaccggagaaaaacgcaattccgttacagatgattccctgagaataaggtccgattgctgccggtgcatttttggtttctacatattttagcatagcttagtccctccttgaatataatccatttcgcatcgtgttctagtataacaggttttactcaaaaactctaggtgtggatttctcttccagcttctttaagatatcagcaggatctgcaaattttgcaagaaagatcatggctgcgataatatacggtttgtagctggcttctttataaagtggtgttctgtagcggtcgaatacgctggcatcgacttcaccggattcgcagctgacacctgtgatatctgcaggcagacagtgcaggtagagcgcgttaccgtctttggtcgtcttcatcagttcttctgtacaagcccagtctttgtgctgtgcgttctgttccagaagttctttttccagagcatcgattcccgcaaagtcaccgtttccatataattcagtacgtttttccatggcagcaaacggcgcccagctctttggataaacgatgtcggcatctttgaaagcttctgccatattgttggtctttgtgaaagaaccgtcggatttttttgcattttcggcagcaacagcttccacttccgggaagacttcatatccttccggatgtgccagtacaacgtccattccaaaacgtgtcatcagtccgatcacaccctgtggaacagagagcggttttccgtaggaaggagagtatgcccaggacatggcgatcttctttcctttcagattctccacaccgccgaattcatggatgatgtgcagcatatcggccattgcctgtgtcggatggtcgatatcgcactgcaggttgacaagcgttggtttctgctgaagaatcccgtctttgtgtccttctgtcacagcatctacgacttcgtgcatgtaggcatttccttttccgatgtacatatcgtcacggattccgatgacatctgccatgaaagaaatcatgttggctgtctcacgaactgtctcaccatgcgcaatctgcgattttccttcatccagatcctgcacctcaagaccgagcaggttacatgcggaagcaaatgagaagcgggtacgtgtggaattgtcacggaataaagagattccgagtccgctttcaaatacttttgtggagatgttgttttctctcataaaacggagtgcgtctgccagtgtaaatactgcttccagttcgtcgtctgttttttcccaggtcaggaaaaagtcagagttgtacatgtctttgaagttgagtgcgttcagtttatcgatgtaatcctgtaatgttttcatagtgtgattcctccatatactcaggctgtgcctgttgtgttttttgctattttgaaaatttatttacaatataaagtcggtagtgcagcgtaaacagcggcacatacgactaggtctgccttccaggtcttttcatttggtgcatgagcctgtgcttctgctccaggcccaaatccgatacaaggaatgccgtttcgtcccatgatggaaacgccgtttgtagagaacgtccatttgtcagtcagtgggcgggcttttctcatcttagcagtctctggtgttccaatcctttcttctccgtaaagtcccttgtaggcttcttccagagcttttgtgactttgtggtcttttggaatgacccaggtcgggaagtagcattcgatcggatataccagtccggtataggatggtctgtcatagttgtacatggaaaccgttacatcctccccatatttctgtacgcttggaagtgcacggatctcatccagacagctttcccatgtctctccggcagtcatacggcgatccagagaaacagagcaggagtctgcaaccgcacagcggcttggagaagtgaagaaaatctcagaagttgtgatggtaccccgtcctaagaatcttgcttcttcccattccggattatatgtttcatccagcatttttacgagtcctttgatttcagttgtctcttcggcatcgttttcgttcagtgcacggacatcctgcaggatatcagccatcttgtagattgcattgtctccacgctccggtgcagagccgtgacaggatacgcctttgacgtctacacggatctccatacgtcctcgctgtccgcggtagatcccgccgtcagtcggttctgtggataccacaaattccggacggactttatcttcgttgatgatgtattgccagcagaggccgtcgcagtcttcttcctgtacggttcctgtgacaaggactgtatatttgtcacttaaaagtcccagatctttcatgatccttgcaccgtaaactgcagagacgatacctccgagctgatcagaagtaccacgtcctccgatttctgtgtcagattcgaatccttcatatggatcgaattcccagttgtcacggtttccgataccaacggtgtcaatatgtgcatcaaatccgatgagtgtctctccagttcccatatatccgagtacatttccctgcggatcgatctcgactttatcaaaatccagtttccgcatctcttcggcgatccgttcaatgtgatccttttccccacagctttcacccgggaattttacgatctctctgagaaattttgtcatatccgcttcatagttctgtgcagcttctttgattttgttgaaatccattttaaaatcctccttgataaacataatgaatgaaatggtttcctgatctaacggtcattgccgtcccatacgatggattcgtaacgtgtaggatcggtatctccttcggtggagaaaagcagtacccgggaagttttattcaggcccaggtgttctcttaattcctgatattcgtccatgcacatgatgcaggcgagcgttccaaacggtgcggctccggattctccggaagtgaccggcgtatctcccttgatcggtgcggcgagcatccgcattccttttgcagcgacccagtccggtgcagcaacaaaggtgtccacatgattctttaagatatcccaggaaatggtgttcggttcgccgcaggcaagacctgccatgatggtcggcatatcaccgtccacgatacggatcgctccgtctccggcaacagctcctttgtaaagacaggcagcagattcggcttccacaacgaccactttcggcggggtcttgggatagcggttcgcaaaatatccctgaacagcaccggcaagggatccgacaccagcctggataaatacatgagtcggggcttcgcagccgtcttcatgaagttgagcgtcggcttccatgaccatggttccatatccctgcatgatccatgccggaatttcttcatagccgtcccacgcagtatcctgcacgatgataccatgttcagttctggcagccatatcggcagccatgcgcacgcattcatcgtagttgcattcttcgatcgtagcagtggcgccttcttttcggatgttgtttaaccgtgtctgtgtacttcctttaggcatcaggacaactgccttttgtccgagcttgttggcagcccaggcaactccgcgcccgtgatttccatctgttgcagtaaagaaagtagcctgcccgaattctttttttaaagcttcggaagtcagtacctgatatggaagttcactgacatctttgccagtctgctgtgcaatgtagcgcgccatggcaaaagagcctcccagcaccttaaatgcattgagtccgaagcgataagactcatccttgatgtaaagtgaaccaagtcctaatttttcggccatgtggttcagttttacgagtggtgtgacactgtattgcggaaaactttcgtggaacgtgcgggctttttccacctcggaaagtgccatgaccggaaggttggcatcctcggtcttcggcatatgattgactgcccatttgattgtctccatgtgtaaaacctccttatgatctgctattttcctgcatccatataactgtaaagtgtaaatttagaaatattgagaagatttgcgaccttatctcctgattttgtgatcagaaacgcaccggcatcattcagatagcggaccacctggatcttatcttccttggtcattaaagccaccggttttccgaccagtgccacgccctgctgcatcagatcgtttaacagctcttctacattgcgtgtgatcgtctgcggcgagtgcggcttgctgactgtgtaagtatctgtttccggttcggtatgaagaagcgaccccagtgcactgtctatcgtaagaagtgctgtgatgtcatagttgatggaaaagatataagaaatcttttcatcggcatcccgtatgtaaagggtactggatttcaaaatccggccgtcctccgtgcgtgtgagataagaaagcttatcttgtactttggcagcgtttttgtgcaaggtctccagtacgatcccggaaggtccgtctccggacttgcggtttgtcacctgtccgttttcaatgtggacgatggaggtctccagatccttgttcagatcatgaatgacaacttcacaggaagttccgaactgttttgcaataccatgcgccatttgctttagaagcttgagtgtatgatccatagtcatccctccctttgtgaaaaacattggtaaaatatgtcaaaaacaactgcttctaaactcataatatcataaaaatccataaaatcaatagtttttctaaaaaagttttagaatgcctaaaaaagttttagaatcgtgttgcatttgtgcagttttgatggtattctataaacaacaaagacagttctggaagatatgtacaaaaataaaagactttcaaaaaagaaaaggagaggttagtatgcttattttaggaaacggcaggatgatcacaagagatgcggacaatccatatctggaatgcggggcagtggtgattgacggtacaaaaatcgtgaaggccggtacgctttcggaagtgaaggcggcgtatccggacgcggagtttttggatgcaaagggcaaggtgatcatgcctgcctttatcaatgcacacgaacatatttacagtgcattcgcaagaggactgtccgtcaaaggatatgacccaaaaggatttttggatattctggatgggatgtggtggacgattgaccggaatttgacactgcaggatacatatttaagcgccaaggctacatatattgattcgattaaaaatggtgtgacaacggtatttgaccatcatgcaagctttggttccatccgtggttctttatatgagattgaaagagctgcgaaagaaaccggagtccgctcctgtttatgctatgagatctcggatcgtgacgggaaggataaggcaagagattccgttatggaaaatgcagagtttatccgtcatgcacaaaaagaggataccggcatgatcgcgggcatgatgggaatgcatgcacagtttacgatttctgatgagacgatggagctggctgcagcgaacaagccggacggcgtgggatatcatatccatgtggcagaagggatcgaagatctgcatcattgtctgaaacattatgggaagcggatcgtggatcgtctgatggactggggaatcctgggagaaaagacactgcttggacattgcatttatatcaacggtcatgagatggatctgatcaaagagacgaacacaatggtggtacacaatccggaatccaacatgggcaatgcctgcggatgtccgccgacgatgaaactggttcacagagggatcctgaccggacttggaacagacggatatactcatgatatgacagagtcttacaaagtggcaaacgtactgcacaagcatcatctgtgtgatccgaatgccgcatggggagaggttccgcagatgctttttgacggaaatgtcaaaattgcagagcgttatttcccgcagaagcttggtgtattgaaagaaggagctgcagcagatgtgattgttgtggattatgatccgctgacaccgatgaacggggacaatacaaacagccacattttattcggtatgactggaaaacaggtagtaactacagtggcgaatggaaaagtattgatgaaagacagagaacttgtatttatagatgaagcaaaagtgatggcagactgcagacaggcggcaaaagagctggctgagaggatcaacgcatagggagggcatgaggatgagtgaagttatgacaccgatgtcatttgaacagttggtagactgggtattacaggaaaagaaaaaaagaggaaccgtgttcggacagcatcatgcgtaccgggcagatggaacacataaccggacgatgttcgggcgtactctggagacgccgattggaccggcagccggtccgcatacgcagatgacacagaatattgtggcagcctactatgccggcagtcgtttctttgaattgaagaccgtacagatcatggatggagaagagctggcggcatgcatcaaccgtccgtgtatcaaggcggatgatgaaggatataactgcgagtggtccacagagctgacagtaccgcaggcaatggaagagtatatcaaagcctggttcttattgaaagtgatcgccagagagtttggacttggagatatgaatggatttcagtttaatgtcagtgtgggatatgatctggcaggcatccagtccccgaaggtggataccttcctgaattccatgaaacacgcagaagatacagaaattttcaagcactgcaaggcatatttactggaacatgcggattggtttgagcacgtgacaacagaagatatcgagcagatcccgccggaaatctgcaattccgtgacactttccacactgcatggatgtcctccgcaggagattgaacggatcgccatgtatctgcttacggaaaaaggattccatacctttgtaaaatgcaatccgacactgcttggatatgagtttgcgagaaagaccatggatgagatgggatatgattacatacagtttggagacttccactttaaggatgacctgcagtatgaagatgcagttccgatgctgacacgcctgatgaatacggcgaaagagagaaatctggagtttggtgtgaagatcaccaatacgttccctgtggatgtgaaacagaatgagcttccaagcgaagagatgtatatgtctggtaaatccttataccctctgtctatctcattggcggcaaaactggcaaaagaatttgacggaaggcttcgtatttcctattccggaggagcggattactataatatagaaagaattgtggatgcaggcatctggccggttactgtggcaacgactcttttgaaaccgggcggttatcagaggctgacacagatggcaaagcttctggacaaggagaatgctccgtttgaaaaagtggacgcagaatctgcaggaaaacttgcagaagaagcggtgaaagacccgcatcatgtgaaggcaatgaagcctttgccgtcaagaaagatgaaaaaagaagttccgctcatggattgtttcgtggcgccgtgtaaagagggatgcccgatccatcaggatatcacaacgtatctgcagcttgtgggagaagaaaagtatgaggaagcaatggaagtgatcacagagaagaacccgcttccgtttattacaggaacgatctgtgcacataactgtatgagcaaatgtaccagaaacttttatgagacacctgttcatatccgggagatgaaattaaaagcggcagaaaatggatatgaggcgctgcttgaaaaacttccggtgccggcagtgacaaaagcagaaaaagcggcagtcatcggaggcggcccggcaggaatggcggctgcatacttcctcagaaaaggtggtatggaagttacgctatttgaggcaaaagaatctttaggaggcgtagtacgtcacgtgatcccgccatttcgtatttcggaggatgccattgaaaaagatgcggaaatcttaagaaagatgcaggtggacatccgctgcaatacaaaggtggaatctttggaagaactgaaaaagcagggatatacaaagatcgtactggcagtgggagctccggttcagggaagcttaaagctggaaagcggaatgccgaaaaatgcactggaatttctggcagaatttaaacagacagacggtaaggtttcacttggaaaacatgtggttgttatcggaggcggaaacacagccatggatactgcaagagcggcaaaacgaaacgcaggcgtggagcatgtttatctgatttacagaagaacgagacggtatatgccggcggatgaagaagaactggtgatgaccctggaagatggagtggaattcaaagagttattgtctcctgtaaaactggaaaacggccagcttttctgcaaagtgatgcagctttccgattatgatgtatcgggcagaagaggagtgacagagaccggggagacagtttgggttccggcagatacggtgatcgctgcagttggagaaaaagtgccgacagactggtatcaggcaaacggtctggcagtatcggaaaagggaagattatatgtcgatgaaaagacattaaaaaccagtgatgacaatgtctatgcagcaggcgatggtctgtatggaccggcaacagttgtagaggcgatccgggacggacgaaaagtggctgaggcaattgcaggagaagtgttggcgcgtgattttgataaactggcagaggaagaaaaggtctatgccaagagaggggtattaaaagaggaacagaaagagacaaaagaggcaggcagatgcctgggatgctcgacaatctgtgaaaactgcgtagaagtctgtccaaaccgtgcaaacattgccattcaggtaccggggatggaaaaacaccagatcatccatgtagattatctgtgtaatgagtgcggcaactgtaagagtttctgtccatattccagcgctccatatctggataaattcacacttttcgaaacagaagcagatatggaaaacagtaagaatcagggatttgcagttctggatcaagagacccgacgctgtaaggtacgcttctttgggaagacctttatctgggaaccggagaaaccggcagctcttccggatggactgggacgcatgattgaaactgtgtgcagggattactcttatttgattcggtaaaatcaaaggttgcaggatctgtgggatttcggtaaagtgaaaggggcttctgatgaagaagccctaaaaaaagaaagagacagcaaacagacatgacaagtatatggaaatgggaaagcggaaatctacagatcaagaagtccctcttagatggactgcagattacagagacagcaaaagaagtgatctctgtagtgggagcaggaggaaaaacaactacgatccgcaggcttacggatgaaatggaaaaaagacagaaaaatgtggcagtgaccacgaccacacggatgaaaaaagaaccgcattttttactcggtgcggatgcagagcgcattgcacaaagatgggggcagactcatcaggtgtggtttggagaacaggatgataatccggaaaaggtcagaggtgtttcagaagcgcttctggatgaggtgagaaagtatggtccggatttgtttttgatcgaggcagacggagccagaaggcttccctgcaaagtaccggagtcgtgggagccggtcatctatcaaaaaagtacacgggtgctggcagtttacggtctggacgcagtgggaaagacctttcgggaggcgtgttttcgtcccgggctggcagcagaaattttggagaagaagataacagacccgatatcagcagtggatattgcgcggctggcacttgaaagccgcggcgggaaaaagaatgtcaaagaaaccatgcggtatcaggtgattttaaataaagcagacaccacgcgaagaagacagtttgcgcaggaaatctgccgggaattggaaaaacgcgggtttgcagatgtgacagtgacagcagaaggaaggcaggaagaagaatgaagattgtaatcaaaggagcaggagatctggcaacaggaattgcctctcgcttataccatgcaggacatcagattgtgatgacagagattgcggttccgctgaccgtgcggcgaagcgtggcgctctccagagcagtttacgaaaacgaggcagaggtggaagatttaaaaggggtgctggtaaaggatgctgcagaagcagacaggatcttacaaagaggagagattccggtactggtggatccagaagcagatattatcgggtcgtttcatccagatgtagtagtggatgcaatcctggcaaagaagaatctgggaacccggatcacggacgcgccgtttgtcatcggtgtaggaccgggattttacgcaggaaaagactgtcactgtgtcatcgagacaaaaagaggacatacactgggaaatgtgatctgggaaaaagaagcaatcccaaataccggagttccgggaaatataggcggctttacaaccgagcgtctgatccgtgccagtgcagatggaatcatggagcctgtggcagaaatcggagataccgtagaaaaaggccagcttgttgccaggaccgggaagcagccggtctatgcaaagatgagcggaattgtccgcggaatgctccagaaggatgtacaggtcacagaaggattgaagatcggagacattgatgccagatgtgaaccagagcattgtgttacaatctcggacaaggcaagggcagtcggaggcggtgtgctggaagcggtatctctgtttggacagatctatggaaattatggagtggcacttctggcagcaggggaagcaaaacggtttggaagtgacaagttgtcggaaaaatttcagggaatccctctttatcggcatgcacttgagaagctggaagcattttcgggactttccagggtggtcgtgaccgcaagagaagcactggcagaagaagcgcagcgcctggggatccatattgtagagaacagacagccggaacagggaatttcacattctgtcagtttggcgctgcaggaactgctctcacaaaatccagacctggagggtgtgttgtttctggtctgcgatcagccgggaatccagactgctacaatccagaagattttaaacgagggatgccttcataaaaacagcattgtctgtgccggatatgatggaatgcgcggaaatccggtattgtggggaagcacgtattttcaggagcttatgcatctgaccggggatacgggcggcagacagctgatgaagcaatatgaagagaagatccggatcgtggagtgtgcgccggaagaattaaaagacattgacaggagagaagacatgacggaataaaaaggggagtaccccaaaggaggttttcatatgctgatggttcatgtaaatggaaaagattatgaggtggagcaggatacgaagctgatgcggtttcttcgggatgatttaaggcttacttcagtaaaggacggatgcagccagggcgcgtgcggaacctgcacggtgctggtggatggaaaagccacaagggcatgtattccaatgctttccaagctgcagggaaaatctgtagtcacagtggaagggctgagtgaacgggagaaagaagtttatgcatatgcatttgcaaaggtcggcgcggtgcagtgcggattctgcattccgggcatggtgatgtgcgccaaggggcttctggatcagaatccggatccgagccgtgttgaggcggcggcagccattcggaataatatctgccgttgtaccggatatcaaaagatcatcgaggcgatcctgctctcagcaaagatgtttcgggaagatcttccggccaaagagaacagcggcgtggtctctgtcggggcaccgatcctgcgtgtggatgcaaaggagaaagttcttggaaccgggcagtatccggatgatgtgtatctggatgatatgatctatgccagtgcggtgcgctccgaatatccaagagcaaaagtgctggcgatccatacagagaaggtattggaattagaaggtgtgatcggagtatatacggcggatgatattccgggttctgtgaaggtgggacatctgaaaccggactgggatacaatgatcctggtcggacatgtgacacattatctgggagatgccatttgtctgatcgcagcagagacaccggagattctggaacgtgcaaaggcattggtaaaggtggattacgaagtgctgcaaccggtgctggatccgtttgaagcattaaaagaggacgcaccccgcattcatccgggaatccagccggatggaaatgtactcgcccatgagcatctggtcagaggaaatgcagaagaagtgatcgccaactcgaaatataaagtgaccagacattatgaaactccgtggacggaacatgcctttttggagccggagtgtgcagtggccatgccgtttgatgacggagtatttatctattcttcggatcagggaacctacgatacccagcacgaatgcagtatgatgcttggacttccgccggaaaaagtgattgtggaaaacaagctggtaggcggcggatttggtggaaaagaggatgtcagtgtacagcatcatgccgcactggtggcatacctgacaaagcgtccggttaaagtaaagctgtccagacaggaaagtatcaccgtgcatcccaaacggcatccgatgtggatggatattaccacagcatgtgatgagaacggatatctgactgcaatgaaagctgtagttgtatcggatacaggtgcgtatgcatctctgggcggaccggttctgcaaagagcctgtacccatgcggcagggccttacaatttccagaccattgacattgacggaaaagccgtgtataccaacaatccgccggctggagcatttcgcggattcggcgtgacacagacctgttttggagcagaacggaatctggatctgctggcggagatggtgggaatctctccatgggagattcgatatcggaatgcggtgcggcccggacaggtgcttccaaatggacagatcgcagatgcctctacaggaattgcagagacactggaggctgtcaaagagatttatgaacaggcgccgtatgcggggatcgcctgtgcgatgaaaaatgccggtgtaggcgtgggactgccggactggggaagatgccgtctgttggtgcaggataaaatggtacagattcatgcgggagcttcctgtatcggtcagggagttggaacagtcctgacacaggtggtgtcacagactgcgcagattccggtggaacagattaggtactgtccggcaaacacatccgattccccggattccggaacgacatccggttccaggcagacgttgattacaggagaggcggcaaaacgggcctgtgaaaaattgtgtgaagatttaaagacacattcacttcaggaactggaaggaaaggaatactgcggagaatatcttgcaaagactgataaaatgggcagtgatgttccgaatccggtttctcatgtggcatatggatatgcaacacaggtttgtattttgaatgaagatggaacgattcagaaaatggtggcagcccatgatgtggggaaagccgtaaatccaatcagtgtggaaggccagattgagggcggtgttgtcatgggaatgggatatgcactgacagaacagtatgagatcaaggaagggcgtccggtttccagatttggaacactgggattgttccgggcagataaagtaccagaaatccagtcactgatcgtggaaaaaccgggagtggaaccgggatatggagcgattggaattggagagatcacatccattccaacggctccggcaattacaggagcttattataaactgactggggagtttcagacgaaattgcctcttcatggaacaccgtatgaaaagaaaaagaaataaagaagaaatgagcaggcgctgatttctcaggaaattcaacgcctgcacgatttacacatcaagttgtttttgaaaataacttgatgtataataaaagaaaaacacaaaacgaggaggtatgagatgaaacgaagaaaaatctggagtattctggcactggcagcattgacaggttccctgcttgcaggatgcggagaagtaaaaacagaagaacagacaaaagaaacaaagcaggaggaaaaaccggtagaattactggtggctgctgcagcgagtctggaatattcttatgaagaagaactgcttcctatgtttgaaaaggaaaatccgaatattaccgtaaaaggcacctatgacagttcgggaaaattacagacacagatcgaagaggggattgaggcagatgtctttatgtcagcggcgacgaagcagatgaatgcgctgacggagcagggattggtggagaaggactctgtggtagatcttcttcagaatcagatcgtactgatcacagcagcagattctacgctggatctgcagaactttgaggatattaccaaagcaaatgtgatcgcaatcggagatccggaaagtgttccggtaggacagtattcgaaagaagtgctgaccaatctgggaatctgggatacagtgtctgcaaaggcaagtctcggaaccaatgttacagaagttttaaaatgggtagaagagggcagtgcagatgccggaatcgtgtatgcgacagatgcagcaactacagataaggtgaaagtagtggcagaagcaccgaaagacagtatggcagagcctgcaatctatccggtcggcgtggtaagcgcatcgaagcacaaagacgcagcagaaaaatttgtagagtttttacagtccgaagaggcgctgaaagtatttgaatcctacggttttcagaagaatgcagagtaactggggaaggagagcacatggagatttcaccgatcattgtttctatgaaaacggcttctgtgtccattgtgatcactttttttctgggactggcagccgcatatggcgtggagcgtatccgcagcagaaagctgcagctggtctgtgacggtattctgacgcttcctcttgtcctgccgcctacggtggcaggatttttcctgttgtacatctttggggtaaaacgcccggtggggagagtttttctggaatttttcgggacaaagattgcattttcatggcaggcaacagtattggcagcagtggcgatttcgttccctttgatgtaccgttcggcaagaggagcgctgcagcaggtagatgaaaacctcctttatgcaggcaggacgcttgggatgtccgaatggtgcattttctggaaagtatggtttccaaacgctatgtccggaattttgtcaggcggaatccttgcatttgcaagaggattaggagagtttggagcaaccgccatgatcgcaggaaatattgcaggagagaccagaacgcttccgcttgcagtctattccgcggtgtcagccggaaatatggaagaagcgtatcagtatgtgtggattctggtgatcatttcattcctggtagtgacaggaatgaatgcagtcacgcacggatttcagaaatttagccggaggtagtacagatgaacgtattagaagtggattttgagaaaaaactcaagaactttcccctgcatatacaatttcaggcagaaggcggatgtatcgggattctgggagcttcaggctgcggaaaaagtatgacattcaaagcgattgccggaatcgagacacccgattcgggaaaaatctgcctgggaaaacgggaattgtttcacagaggtcataaagtaaatctgccgcccagaaaacgtagtgtgggatatttgtttcagagttatgccttatttcccaatatgacagtgtttcaaaatattgaagcaggaatccagggaaaaaaggcggcgaaaagagagcgggcaatggaaatgatggaaaaatttcatctgtcagagctggcatccggctatcccgcccgtctttctggaggacagcagcagagagtggccctggcgaggatactggcttgtgaaccggaactgctccttttggacgagccgttttctgcactggacagttacttaaaagaagaactccagtttgagttgaaacaacatctccgggagtttggaaaaacgacaatcattgtaagtcatgaccgggatgaaatatacaagttgtgtgacagaacgatggtgatggggcagggcgaaattctggtttcaaaagatacgaaagaactgtttgaacagccggagcgtgttattgcagcgaggctgacaggatgtaaaaatatttcgagagcaaaaaagtgtggaatgcataaagtgtatgcaatggattggggcgtggaattgacggtagaccggaaagtttcagaaaaaatcacccatgtaggaattcgggcgcatgattttcatccggcggatgcttcgtcacatgatagtgagaataaaattccggtggctgtggaccgcgaggtacgcgcgccgtttgagtggacgattttatttcgaaacagagaaaatccgaaagaaaatatgtggatgaagatggagcgggaacagacacagatcccgcagtgggtacaggtggacccgaaacgaattttgcttttagaagaataggaggatgtgagagatgtttcatccgacattaaaaattaaaatatatcaggaagatctggtatttggaccgggactggtcattttgatggagcacattctggtgacggagtccatgaaggatgcctgtggggaaatgggaatgtcctacagcaaaggctggaagatcatcaaccgggcagaaaaagaactgggctatgagttgttggagcgcaggcacggcggaaaaagtggtggaaaatgtacggtgacagaaaaaggaaagtccctgatgaagcgctatcgccagatggaaaaagaaacaagggactgcctgcagaagagctttgaaaagtattttccggaatatcaaaggattcggtagattttcctttcattcagaagtataataaaaaacaggccacagaacaaaacagtgagccggaaatggaggaaaaaagatgccgaactggacaagaggacagctgaaaaacaatgcaaagatgaatttttataaaaattactggatgtgcgtaggcatggcattgattttgacacttgtgctgatgatggaaccggatggaccgaaaaaagagatcatgttgaagatcagagattacaccgatattcttcctgcttatggatatcagggctggttgtcaagtctgtttgatgggttgggatactggtttggagtattatggtccgttttttcattgtttattgcattggtactgcttctgatcaagattgttgtgggaaacgtggtctatgtaggcggcattcgtttctttattcagaacaggagagagaatccgtctgcgggaactatctttttcggatttcagaatggaaattacggaaacatcgcattgaccatctttttgaaagatctgtatactgcactttggacacttttgcttgtcgtgccggggattatcaagcactatgaatatcggatgattccatatattctggcagagaatccgacaatgccaagagaagaggcatttcagatcagccgccgcatgatgatggggcagaaaatggatgtattcgtattagatctttcatttatcggctggtttattttagaaaagatttcatttggactggcaggattattttttgtaagaccttattatgagactgtatttgcagagctgtatgaggcaaataaacagaaggcataccgggaaggatatatccggtaatatgaaaaggggctgcatcaggactttcatcctgtgcagccttgagaaaagggaaaatttatctaaaattaggtaatgtcaaaaataaatatctgggcgaagtccaatgaccacagatgcgctgcatgtgcagccatcgtcttctgtttttgttgatagatatagaataccagtgaattgtgaatgagatgtgacaagaagtgaaaaaatatcttaattaaatgtaatgaaagtataaaaaggagcttatagattttttagaattaggaagtctgattgacgagatgtatcgtgtttttggaaacagagttccagaaatccctgcgtgcatcgtactgctccaaaagccaggaaatcgcagcatccattccatcctcggtcatgggaaatgtattctgtgttttttgttcgtctggtgtcttttcaaatgaccatggctccggatatacaaatacgagaaagttttcttttgtatcgtcagcacaaaaataatagcgcattccaaaatgagaacctgaaaagggttctttttttaatcctttgacagggatgagtttcttatcgatcatggtgttccctcctgaaaagttattaactatagagtaacactgcatcagagaagatgcaagaataaaaggacaaaaggaaagagccacatttctgtgactcaaagggggaaaaagtttatgaaaaagtgttctgttcttttgaacaattatagtataaaaagaaattgtgtaaaaaatgtgatataaatttgaatctaatgttaataaaaccaaaagaaattgtgaagcactaattttgtccggcattttctgcaaaatcagttgtgaccagtttttcataaggagcgcgggccttcagctcgccggcgctttccaggatatcctggagcagttcaaagctgtcacgttcaaagatcagattttctttccaggaatcctgctcataatagcgggatacgatggttgtgatcgtggaaaggtctgtttccgggaattgcggttcaatgattttggcaatctcttccggagaatgtgtctgtacgtagtccattcccttttgcagggcatttacaaatccctgaatagtatctgaatgttcactgatatagcttttgcgggcactgaaagcggtataaggaatgtatccgctgtcggttccgagagaagcgaccacatatcctttctggcctgtttccagggatgtggctccgggttcaaattctacggtatagtcggcctgaccttctgagaatgcggcggcagtggaaccaaaatcaatgttttgtacaatgttcagatcggttttcggatccataccgtgttgctttaagatatattcaaaaaccatttccggcattccgccctttcgtccgccaagtacagtgcttccttttaaatctgtccactcaaaatcgggcctctcttctctggcaacaagaaaattgcctgcgcgctgggtgagctgggcaaagtttacaacaaagtcagaagcgccttcgttatacgtgtaaatggaagcttccgaccccataaatccgatatctgcttcaccagaaagtacagcagtcatcgttttgtcggctccaaaccctgtgacgagctccagttcaatgccctcttgccggaaataatctttttcaatggcaacatacataggggcatagaaaatcgagtgtgcaacttcatttaaggtgagttttgtcaattcctctttggaagaatccggattgccgccggtcggggtactgttgtttgaagagtggcatcccgtaagcaggatcatggatgcggcaagaagaaatgtgagaattctttttttcataagcactccatagtttttaaagatgttactaaaagtatatgccggaaaaaaagaagcgtgaaaaaaaccggtctgaatgaaatcagaccggcataaaattataatttaaaattagtagttatcgtgatcctcttcgaatggatcatcataatcatcaaagtcttcgtcttcctcagtgtcacgtctggacaagatcgtcaggatcaggaagatcactgcaagtacaacacatgcgatcgcactgtataagagcatcttgtcatcaccatgtttcaggaaaccgatcacgctgcatccgatataaaagagcatcgggagcaggaatgcaaaaatcgtattgctcttctgaagaatgagaagaagcagtccggagatcagcatgcaaagtgccatgatgacatagaaagtaccaatgttggaattacttccggaggtaatgctgtccagtccgctgatcactcctttgtatgtaaagaaaccaaacgctacgatagaaagaagtccgaaaatcacacggagtacccggaatcttggagtgatgtaatcatcctcatattctttctcgtcttcgatttcttccggttcttctactggcttcggcgccggcttgcgtttgtgtacagactttctgtccggatcagatgcaagcatatcctcgtaactttttttcactgcacgttcacgttttgcacgtactttttcagaaggaatattaccgtaacgctgcccttcttcggaaggttcctgtttgaattcttccggaacagaaatcactcttgtttttgaatctgcaggagccgggcgttttttcttaggtacagcatcagaagcttcggaagcaagacgttttttccgaggcgcttcttcagaatgatcagagaccggacgtttctttttcggtctttcggaatgctcagaaacaggtctttcggaagctggacgcttctttttctgtacaggctgttttggctcgtctgtgtgctcagcgattttcttttgttctgttgcttttgtttcttctgttttttctacaggtgcttttggcgcctcctgctttggagctgcttctgtatgttttgctacagaagcagccggtttaggagccgatttttttgcacgttgtttgtcaagattccattgctttttgcagtctttgcagattgcgtattcgtttaaaaccggattgccattttcatcaacccctacttgctttttctgtaaaatgacatcctttccacattttgggcatttcattatttatatctctcctttgtatcacttgttgtgactcgttttacctacgataaagacattatagcattttgtttgacgaagaacaacgttttttgtcaaattatcgtgattggagagtgggtgtgttactgaacagtaaccgggtgtgctccctctatgattttggtttgacgagtggagtctgatattgataaacatcattgtaggcatcaagctcgtcctcggattcgggcagcgccgggatcagtccggtgcagtctgtggaggaagcggcattttttaaataatcataatggtcaatcagttcttgattttttttcatttctttttgtgtttctttatccaaaattatcacctcggatttagtgtatccatgatgaaaaattgtattcagaacaaaatgtggtatactgaataaaaaatcaaaagaaatggagtggataaattatgagattgatcgcagatacacacgcacatacaattgcaagcggacatgcatacagttctttgaaagaaatggcatatgcagcatcaaaaaatggactggaagtattatctttgacagaacatgcacctcaaatgccgggatcttgtcaggagatttattttcggaattttaatgtgatcccgcgcgaaatgcatggtgtgaaactgcttcttggaacggagctcaacattatgaatccggacggagatctggatctttcagaatctctctgcagaaatctggacattgtgatcgcatcgattcattctccatgttatggacttgatcataccagagaagaaaatacgaaagcttatacggcagtcatgaaaaagccgtatgttgatattatcgggcatccggatgacggcagatttccggtagattatgaagtgctggttcaaactgcaaaggagacaaagacgcttttggagatcaataacagttccttaagaccggatggattcagaaaaaataccagggaaaatgtgctgcaaatgttagaattatgcaaacaatatgaagtttgtgtgacaacgggaagtgatgctcacattgacgtggatgctggaaatttcagctatataaaggaagttttggaattttgcaagttcccggaagagctggtggtgacaacagattttaataaattaaaggaatttttgaataattataaagaatcgtaatatttctttaaaaaattgaaaattgtctgaatctctaaaatctctataaaaaagtggactttaaaaatttagtgtgataaaatgtaaaagtagtgacctgactgacaaaggagaggtaagagatgagtaaaaaaatcagaacagaagcagtagattacctgtttgatgcaatcttgagtctgaaggacaaagaggagtgttatacattctttgaagatatttgtaccatcaatgaattgctctcactttcccagagatttgaagtggcaaagatgttaagagagcagaagacatatctggagattgcagagaagacaggcgcatccacagcaacgatcagtcgtgtgaaccggtcattgaattatggaaatgacggatacgatatggtgtttgagcggatggaaaaataaaagatgtgaagaaataaaaatgcccggccagtatagccgggtatttttatttcttatgggaagaatcttcgctggaaaacgtatcgattagtttttcaatcatcattttttttacgtatacgtcaaaactcaggctgcagataaatgccagaatctgaaaagtatctttgctggtatcaggaatctcggaaaatgtctctccggcagtctcccaggcagaagaaatattttctttgagcggttcaagctggcctttgcacatggtgcagatctgctggtacatatctgcaaggctggaagtatccttgtcagaatcctgaccaaagccggcatctgtcatcggctttaacagtgtctcgatatccttgatggaaagaatacttttaaaatagtaaataaaaatcagaaggagcagatgatccttggaatatttcttcttaacaggcggcggaagcagattgttcttcgcgtaattgttgatcatggtcttggtcagaatcttgtcatctgcgtagcgcttggttgaagaaagctgagtatccataaatgtggtcacctgatccatatataagtcgatattcggaatatcctcgggatgaatgtagtcgatccgggacagactttccagtatgctgtttaaaatatcatttgtatcaattgtcatataatcacctcgatgtacttattatatagtaatgaaaaccagatagtcaagcagtatttattattgatatatgatcataacgagagtaaactaaaagaaaaacgggaggatttcagatgttgaaagcagaactcagtcgatttaaggtaaaagaaggaaaatccgggaaagtagatgaatggatggcctttctgaatgaccatatggaagatacacttcttacattagagaatgaaaaaatgtttgtagaatcgattcaccgggaagtggtcaacggaacagaatttctgtattggtactctgtacagggagaaggcggtacagaggtgtacgattcagaaagctatatcgatatcaggcatctggaatattgggatgaatgtatcgatgatgattataaagataatgatattccggcagaagtagtgatgatcccaaataagatcagagatgttatgaagtgaatacagtcattaaaatcccgctgttttgtaaggaaatggcggagattttttatctgtttccataatatagttgacttgaacgaaactatgttcgataatagagtcatgacaattaaaggagatcaattatgagcatttatgatacactgaacgaacagcagagggaggcggtctactgcacagatggtccgcttttgatccttgcgggagcgggatcgggaaagacgagagtgctgacgcacaggattgcatatttaatagaagaaaagggtgtgaatccatggaatatcctggcgatcacgtttacgaacaaggcggccggggagatgcgggagcgtgtggataatctggtaggatttggatcagagagtatctgggtgagcacgtttcattcgacttgtgtacggattttgagaagacatattgaccgccttgggtatgatacgaattttacaatctacgatacggatgatcagaagacattgatgaaagatgtctgtaaacaggtgcagatcgatacgaaggtatataaggagagaaatcttttagcggcgatttcggcagctaaaaatgagatgatttccgcgcaggagtatgcattgaatgcgcagggagattttggaaaagagaagatcgctaaggtatatcaggagtatgaaaagcagatgcatgccaataatgcactggattttgatgacctgctcgtgaagactgtgcagttgtttgagactcagccggatgtgttggagaattaccaggagcggtttcgttatattatggtggatgagtatcaggatacaaataccgtacagtttcagctggtgagtctgctggcgggcaaatacagaaatctctgtgtggtcggtgatgatgatcagtccatttataaatttcggggagcgaatattaaaaatattttgaattttgaacaggaatttcccgatgcgacagtcatcaaactggagcagaattatcgttctacaggcaatatcctggatgctgctaatgcagtgatcagcaacaatgtgggcagaaaggacaagcagctttggacagacaacggcgaaggagagaagattaagttctgccagtttgataccggatatgatgaagcagaatatattgcagatgacattgaaagggaagtaagaaacggggcatcttacaatgatcatgcgattttataccggactaacgcgcagtcccgcctgtttgaggaacggtttgtggcacagaatattccatataagattgtcggcggtgtgaatttctatgcgagaagagaaatcaaggatgtgcttgcatatctgaagaccatcgacaatggaaaagatgatctggcagtcagaaggatcatcaatgtaccgaagcggggcattggcctgactacgatcaatcgaattcaggagtcagcggcgtccagaggaatcggattctatgatgctcttttagggctggatctgataccgggggtggcaagaggtgctgcaaagctggaaggatttgtggcattgatcgagtactttaagggagtggcagaaactttaagtctgtcggatcttttgcaggaagtgatcgataagactggatacatagagagtctggaagcagaaggaaaagaagaggcagagacgagaattgaaaatatcgacgagcttcgaagcaaggttgcggtttatgaagagtcccgtctggatcaggacgaaaaaccgacgcttagcggatttttggaggaagtcgcattggtggcagacattgatagtctggatgaggaacaggattatgtagttttaatgacactgcacagtgcaaaaggtctggaatttccacatgtgtatctggcaggaatggaagacggactgtttccaagttatatgacagttacatcagatgacagggaggatatggaagaagagcggcgtctctgttatgtgggaattacaagagccgagcagaaactgaccatgaccagcgctatgcggcgaatggtgaggggagagacacagtacaataaagtatcccggtttatgaaagaaattccattggaactgcttgacaatggcaaccgttcttcgaaaatgtttgaagaaagacaggagattccgaaacagactgcgtatacgcaggcaaaacagacttttaaggcaaaggcattttctgcggctgcgccaaaacagtttgcagtcagcaaagaaaaggggctggattatggtgtgggtgaccgtgtccggcacatgaaatttggagaagggatcgtgacacagattacggaaggcggcagagattttgaggtgacggtagagtttgacaccgtcggagtgaaaaaaatgtttgccggatttgcccgtttgataaaattatagaaattatgtgaatttggcataaatcagtagtaatctgaaaatgatagtgttataataatgaaaagcaaacctgtacggcggcaaggagaaaggacgtgaatatatgagtaaagttgaggaattgatcgcagagtcaaaactgaatgaattactgaaaaagaaagatgatgaaaaagtgaaaaagacagtcatctgggtattggcgattgtaggtgctgttgcagcagtggcagcgatcgcatatgcggtatattgcttctttacaccggattatctggaagatttcgaagaagattttgatgatgatttcgatgattatttcagtgaggaagatcaggtttaatcagaacgaaaagagaacagaagacaggatgtggtcggaatacactgcaccctgtctcttttttcgtcaggaagtattacaaaaacaaagaaaagataaggataaaagagaatgaaaaaaggacaagtattagaaggaacgatagaaaaagtggaatttcccaataaaggagttgtcacagttgcagaagaaggtaaatctgtgatcgtaaagaacgggattccgggacagaaggtaaaattttgtgtgaataagtttaagcgaggaaatgcagaggggcgcctgttggaagtgctggagaaatctccgctggaaacaagaaaaccggtgtgcagcattttcccggcatgcggagggtgtatgtaccagactatgtcttatgaagcacagatggaaatgaaggcagaacaggtgaaaaacattctggatgaagccgtggatggtgaatatctttttgaaggagtgaaggcaagtccgaaagaatttgcataccgcaataagatggagttctcgttcggcgacgagtataaggacgggccgctgacattgggactgcataaaaaaggtagcacgtatgatgtgctgacagcgtcagactgcaagctggtacatgatgacatgacaaaaatcttaaattgtgtgctggaatattttaagcagcgaaatgtcagctattataagaaaatgcagcatacaggctatctgcgtcatttgctgcttcgaagaggtgaccgcacaggagaaatcctggtcaatctggttacaacgacacaggaagaacacgatatgtctccattaaaagaagcactccttaatttggaactggaggggaaaattgtgggatttctgcatattttaaatgattctctttctgatgtggtgaaaagtgatgagaccaggattatttacgggcaggactatttttatgagaagctgttgaatctggaattcaagatcacgccgttttctttcttccaaccaaattcaagaggggcggaagtgctttacagtacagtgcgtgattatatcggagatatcaacgatatgacagtgttcgatttgttcagcggaacagggacgatcgcgcaggtgctggcgccggtggcaaaacaggtgatcggtgtggagattattgaggaagctgtggaggcagccaaagaaaatgctgcacacaacggactttccaactgtaaattcattgccggggacgtatttaaagtgttggatgagattgaggaaaaaccggatgtgatcgtcctggatccgccaagagacgggattcatccaaaggctctgccgaaaatcctggattacggagtggacaagattgtgtacatttcctgtaaagtgaccagtctggcacgggatctggaaatgatacaggcaagagggtatgaggtagtgaagagcgtggcagtggatcaattttgtcagacggtgcatgtggagacggtgtgcctcttgggcaaccgaaatgcaaagccggatacccgtgttaaactcagcgtagacacagaagaactacagagagtaaagaacggagaaaaaatttaatacactgaacttatagaagagaactgttagtgcgtcaaagcattagcagttctttttttcgtgtaagggaggtggtgccgttgggctgctacataaaaattctcggatgattctgcatccgatacaaggtctgcaattcaaatctaaaacaaagcaaatctaaggaggcaacattatggcatttaagaaattcagaaaaatgaaagtatataacgtgagtggttacaactataaggacacaccaaccatcatcttaaagggagattggttgaaagaaaccggttttgatattggcagtttgattcaggtggaatgtgaaaatggtaagttgatcattactccaagagaaccggaagaagtggaatatcatgctccatgcggaaagtgcatgatggtggcagaagattgtaaatggtatggcaagaaagggagaaagtgattatggcaaagattatcgtattgggtgccatgaagggtggagtcggcaagtccgtctccacttacaacctggcatattcattgaacaaattagggaagaatgttttggtagtggattttgatagttcggcaaatatcaccagatgtgtggtagaggatatgaaaactgttgaaatcagtattggtgacttgatgatgaatcagatggacgaagaggagcagcctaatccggctgagtacattattaacagaaatggggttgactttataccatcatcaaaagtgctgtctgctgtagatgcgaagttgagattggaaatgggtgcagagaagattctggcatgtattcttgaaccgttcagagagaaatacgattacattctgattgatacatgtccatcattgaatactttaacaatcaatgctctttctgctgcagatgaggtcattatagcggcaaatcctcagttctgggcaatggtagggttggaagacttccttctgaccgttaagaagattaagagccgggtcaattctaaattggatgtgtctggtattctgctgaccatgtgtgaggaaagaaccaatctttgcaaggtaattaccgatgaagtggcagagacattcaaagggaaacttcgtatctttgacagcaagataccaactacggtaaaagtcggagagtccgtgtattatggagaaccgttgttagaatatgcaccgagaacgaaggcttgtagagcataccataatttggcaaaggagttgattgcggatgaaggctaatgcaccaaaaagaaaagtatttcaagacgcggtggacttaatcagtccagaaacagtaaatgttgtagacaatggacagacaatgatacctgtggagaagatagtaccattccataatcatccgttccgtctgtatgagggaaaacgccttgatgacatggtggaaagtatcaaggagcatgggattcttattccggtgattgtacagaaaattgaagatgggtatgagatgctttccggtcacaatagatggaatgctgctaagattgcgggcattacggagattccaacaatcatcaaagacaatctgactgagagagaagcatatgtgtatgtgatagaaaccaatatgttgcagagatcttttgatgacctcttgccgtcggaaaaggcagcagtattggcagaacgatatgagaaagttatgtgtcaggggagacgaaatgacattctggaagagattgcaatgctgaatggtatggacgcaccagagacttgtggacatgatgtccacaagtcaaagagtagagattccattggagaagattatggaatgaccggacgcaacattacaaggtacatgagattgaatcagaccacagatcagattaaggaaatggtggatgatggaacaatggctatggtgacagcggtggaattgtcctatctgtcagaagaggaacagaaacatgtatgtacagtcatggaagaacatggtgggaagataaagaatgctcaggctgtggaactacacaatgcggcaggttctctcacagaggacaaagtaaagaatattctggcgagagaagtgaaagagaagccggtatccgatgcaaagatgtttgcccagataaagaagaaatactttaagggtaaatccacggatgaaatcatgggagttttggaacaggcattgtccacatggtttgccagagagggggaagtgaatgtttgatacaagacagtttgagaaaatcaatccccagtatttcaacattattatgttgagtgagcatgatgtgacggtacagtccagaaataccgggcattactggtacctacataatacggattatccgtcagaagggaactgcgtgatattccataagcataaagcatcccatccgtatcatctgcatggcagagcaggaacattgccacaggcggtgcggagtattaagaaacatgataaatggcagatgaatgggagaaaataatacgaacttacaagaaaaacggcggtgcatgatttgtacttttttcatgcatcgccgtaatttttatttatacatttcaagaagctcggcataggcgatatagataccagcccttgccaataagtcttttcgcttttcatatagtggttgtaaaatcgtctctacatctttgccataatgaatttggttatgacagttactgcataaagatacgatattctcctcaacatccaaagaaaaatcaaaattatcggaataagccattggtattaggtgatgcggttcagtataaggtaaattatttttctttcggatgaatgttgggtgttctgaatctatttcgcatttatattctgcgattcttaaagcattcagtgcagtattggtgtcacgtggatatgcttcagaagaggaaacttttgaaggagattttttcttttttggagttcctttgtaagccggcttttctggagagacactgtcaatttcattgatggtatcgtctaataattttctatcaagttcagattcagcagcaacatcctctttagagacttttttatattcacgtgtttgtgtagaaatacgcagtcctaatactctggttaaaccgtcaagagtagtatcggattcttcggaaaagttacatacgcttgcgttttcgatgtcttttattctcgtaggagaaataaggccggttcgtttaataaaatccggaacatcggttgcatatattctgagttgcgctttacgcggattgccggaagccctttcacgaggcgggttataattatatctcatgttaagactatctaaaacggaacagattgtttctgtacaaagatcgttacggctatccaatgttatcatcttagcacttttatcccaagaacttctgccatcaaatacaccagaaataaatgcgagacgaatagattcatcagaagaaagaatgtcatttgcaaaacgttggattagttcttctggagtatttaagtcttttgattcaaacaagaacacaaatccatctttgtttggttgcatatattttgtgaaatctggttcgccttttgaaactgtccctgatgggatttcagagaaaacatttcctaggtgttctttatgtgcagaaaggttttctggtgttgccttctgagggttgtgaataacaggaagcacccatgtagatgttccggtttcatttgtatgtacatcgcatgaagaaataataccaccaatacagaaagcttctgctggtgaaaatggtgttgtgaattgatcgattgaacgactcatgaaaaatgcactcctttctgaaagttggtatttagaagtgtaccataattttaagaattatggaagtggttctgcaaaataaaacattgcaaatatcattgtaaaagtaattacttttacaatataaaaagaaataaaaataagatagttaataaatattgtaattttaattatatctgttataatagaagatgtattagtgcggaaggaggtactacgattgagcgataaaaaagtaaaaacaccgatggagcatttgaatattggagagttcaaccgtggacaatcttcaaaattgattaggggattggtagaagcagataaaaccgcttttattcaaaagaatggaaagccgatagcagtggtaatgtcatatgaacgttatcagcgaatgttcgagcagggacttgatataaatgaattttaacaaggcacaggaatatatgaacaggaaaggattggctatggctgagatgaaattatataatcgaaattgtatagatgccatgaaagacattgaagcggggacagtagatttgattgtaactgatccgccatataatcttggcaattttatgaaaaatagagatacgaatttgcataaaatgagagacaatttttttgcgacagcagggtgggataacatggaatttgacgagtggtcaacatctatggattccttctttgagtcggcagctcgtgtgatgcgaaaaggcggatctatgatagtgtttatgtctatcataaaggtagaaacgataattaaactagcagagaagtatggtttttattataagactactggaatttggcataaaacaaatccgatgccacgcaatatgaatttgcattttgtaaattcaacagaagcgtggatatacttcacatataaaacaagaactggaacatttaataacgaaggttcaatgcttcatgattttgtggaaacttctgttacaccaaatggggagagaaaatatggtaaacatccgacacaaaagccagaaagtttaatcaatcattttgtgaaagtgctttctaatgaaggggattgtgtcatggatccgtttatgggaagtggaacaacaggtgtcgttgcaaaaaggcttgatagaaattttattggaatcgagcttgatgagacttactataaaatatctaatcagagaatacaggaggcatgaagatgagaccaaaagttatagatttgtttgccggggtgggcggattgtctcttgggtttgagcaacatggatttgatgtgatattagccaatgagtatgatgcttcgattgcggctgcttatcagttaaatcataagaatacaaaaatgattgttggtgacattacaaccttaaatctggaagaggtttttggaaaatacaaggggaaaattgatgtagtcattggaggaccaccttgccaggggttctcacaaaaaggtcagagaaagaccatacatgatgaaagaaatttcttgtttaaatactatgttgcagttgtggaacttgtgaaaccaagatattttgttatggaaaacgtccctaatttattgtcagcagagggtggcttttttagaaatgaaataatggaattatttgattcaatggggtactcgttgaacatgggagttttaaatgctgcagattatggcgttcctcaaaatagaagacgtgcagttattatcggaaaaagagatggaaatgctccagaattgccagcaccactagataaaacagttactgtttgggatgccattagtgacctggcgtatttgcagtccggagagggtaaggaagaacaggaatataaaaatgaaccacaaagtgactatcaaaagaagttgagacgtgaaagttctattttgcataaccatgtagtgacgaaacattccaaattagcattggaaagattggctttaattccaccgaatgctggaaaagaagttcttccgaaagaacatttaacaaaatccatatatagcgggacatggacaaggatgcgaaaagaggaaatttctgttacaataactacacgttttgatacaccgtcatctggaaaatttacacatccgtttttggacagagcaattactgtgcgtgaagcggcaagaatacagtctttcccagataattttgtatttgttggaaataaaggctcacagatgaagcaggtaggaaatgcagttcccccacttctggcaggagctattgcggaagttatcatgaaagacattaaggaggagagagcacatgaatagaccggatactattttgacatatgatgagatggatttaaaattaggaattaagtcttctcttcctcatgtgaaaagcacacttgctttagctgtgttgctttgggaatgttctgaccatccagcagaattaacatattctgtgagcaatggggataaaattgttcttacagaggaaatagagcaatggcttattgactacttaagcgagatctgtgaagaggagcagattgattttgaagcgttgataactggagtaaatcaaaatcagttgttcaaatcgcagatggaagcgttgattgtagcgtttgaactggtatggaaattagcaagagttaattttgtggatgaaactaagccggcgagtgctgaaaggacaggtggtgttagatatccaaaaaaactcacgtattccgttaatgcagatataatccacagcgttatttctggcaatgaaaatgcatatatccgagttttgatgtcatggattggattcaatatagcggttgatccagaatgcgaaaaaacattgacatacttgtttactgcattatcagaaggtgctgtattcaagttggttgatggaacaaaagatgttatttttaaccagaatagtatttataaaaaatttctggaaacatcacaagcagtagatataaatggtgataaagaagctaaaggtgcattaaggattcttaaatcattgttgtcagatgaaatgaatccatatttgcagtattctggtggcagtgtaactgcgactacggacatctctgagcgtctggaagagtatcagaaacgtgtagatacccttttacagttatctgcaaccaaggtaattggcctggaagatttacagtcccagaatacaggaatccaattaactgatttggaagaaagaagagtatcaagcggatctaatgttcttctgtatggagtgcctggctctggtaagagctggacaatagaacacgaatattgtaagaagggtacaaatgttgaacgtttagttttccatccggattatacatattctgatttcattggacagattttgcctaatgttgatgaggagggacaggtgagctacaaattcacaccaggtccttttacaaatattctccacgatgcgtataatgagccagagaaagagtatatccttattattgaggagataaatcgtggtaatgcaccggcaatttttggagaagtgtttcagttgcttgatagaaaaacagaacttcgagaagcagatgatgatggctacccggttggaacaagcgaatatggaattacaaatgcgaatattgcaaagattgtttacggggatgcaagacataaagtacgtattccatccaacttatcaattattggaacaatgaatacctctgaccagaatgtgtttacgcttgatactgccttccagcgtagatgggaaatgcgattgattgaaaataattttgagcatgtagacaggagtttagctgatgcggagattcttgatacgggtgtaacatggcagacattctgtacagagattaacagtattatcgttggaaataatgctcgtatgacatcagcagaggataaacgtctgggtgcatattttgttcatttgaaagatttgatgtataacgatgaaatgggaaatctttctgatggtgaatatgatgcactacgtaagaaagaacaatcaggaaccattacagaaacggaaaaggatagattgtacgcaatccgcagtgcaatgaagcagaaccgaaaattccctgaaaaagttatcaaatatttgtgggatgatgcattcaaatttaatagggagattgtttttgaaacaaccacctatcagagtttagagcaggtaattcgtgtatttatgtatgcggaaaagataaatcgtttttcaatgttcaaggaaaacgtaagaaatgcattcataagagacgagcagtaaggcggtgagataatatggatttggatacggcgttgaatacagcactgcaggatgatgacatcacgaaacattgtcatgtaaatacaaatgaagatggtgatcgctttgttgggattaaagcagactctgacaacgtaatggtctatttccctattggataccagttacctgagacggatgctgagataagaacagatattaagcatttaattcaggttctgtctgaatttacaacaaaagaagacaggcttctggctgtcaataagtttgctgctccacaaacggtggattttccaatcaatgcttataagaatgttatcgagtattatttttcaatcggtggaaaatattatgtggaagtagatcccacattcagaaccagtgctacgggaaaacaagactggccaagaacagtaagaaatcaaattcctttggtacaacaaagagatggaataagttcttttatttatacagagtttaccgtgcgggcaacaactccgaatgaaacaaagcagattaccttaatcaataggttttgtgtatatgaagccttcaagaagctgggatggctttatgttccatatatgcccgaacagccgggaccacatccggatgtgaaaacatccattgctattctaaatgcaaaattaggaaatacgaatgatgataagaaacgtaatttgttccaatccatgaaggatatgcttcagtatatggatgagaagacatcagagaagcagttttacttcggaacagataattttgattatgtctgggagaaactgatagatagagcctttggagaaaaggataaagaaaagtatttcccacgttcacgctggttgttggattatggaaagtataaagaaaaacgtccgttaatgccggataccatcatgatttataacgggaagtattacatcttagatgcaaaatgttataagtatgggtggacaggcataccagaccatcttccaaatggctcatcaattaacaagcagattacatatggtgagtatttggaaaaatataaaggtgttgataccaattcactgtttaatgcatttattatgccttacaacatggccaagaattattttaagctcacatcggttgtaggcaatattggagaagccgttggtgattggagagaaaataaaaaatactacgagcgtattcaaggaattgttatggatacgaggtatttgatgtatcattatactggtaatcctgtgaaggaaaaggttgctctggcagattgtattgaagctgtattgaatagagaagaggttccgccagctcccggagcagttccggttacaccagttcataaaccggtagtatatgatttcaacccgaaaactacattatcaatggtagctgaagaaaaagtaccatacggaaataaagaaaattaaaaagaacctgtgttatgcagttcaactgactgtataacacaggtttattttattttccaagttctctttttttcttgcggtatctgtcttgtgtgacgcggttgcagcattccgaactacagaattttgttcttgtggatgtggtcttaacaagaaaatatttttggcaacgcggatttgcacattgacgatatagctcaagatccggttttagataaaacatggaaaaatatatagcactaagcagtgaatctactttccatgaaggagacattgtctgtacatcatacactgggtatataccacttagatttgcatttatttcttcgcctaatacaaatcgtgcaatttcaatcaatgttgatttcatttcattactcatagtagaaaggtctgttggagcaaaaaatgtaagaccatcaaccatatcacaggtgcggagctgcgaaaaatcatgatgaagatgaaagagaaaatcaatggtttttctttcgatgtcagtcccattatagttacaatataattgtgtaatctgacggtaaagtggtgtgatagaaatagcaccatcaatacaggttccacttaagatattgttatattcgtttatattcaattcataggaaggcgcttttattgtatccacaacggtgtaagtgtctttctcaaatgcttcctgctgacgttcccatccaagtggtagagaaactgcttttgagagcgtgtcgaggaaagagtgtttgcaagtagtataaactttcggtaaagatgccatatcaatttgcaattgttctgaaagcatcagataaaaagttaaatgtgctattttattgtaatccttatggatttcatttactgctgtcataagttctacagttgccttgattcttaatataaattcataaagcaatgcagcatctatgcgttcatattcagaagaacttacagggaagaggaacccattgcgtttaaagaaactatataaatcagatggtttctttgtgggcaatgcaatcagcgatcccagtatattatcttcttcggtagtaccgttcgcagcaattctggaaagtccggttttggctctgtagccgaagagcagtggcttttctgtgtcagactgaaatttataagtttttagcggaggcataccaggggcagtgtgttctatgtcttctacacaatcacatccataactctgaaatgtaaatatattattttcaaaaaaattttcaataatctgaggcataattttcccctttcatgttgttaaaagtcatgcgttaaaccatggctttatttttttatttcaaaatagtaatggtaaaaaccattttatacatgaattataaatgaaacttcatataaaaacaatgatattaacattattaaattgaaaaagtaatgtgtaaacttactatcttcaattatttattgggtttcaatatactaaacgtagaaagtgaggtgatctcaatggcaaagaatagcaagcagacatccagaagagttgcatctacggcgagcaagattcttcgtgatggacgttatggcaaggattcaaagtctgtggctgccagtgcattggcacagaccaagccacgaggaaagaaataatttccataattcggacaggcagagaatgattggacaatcagcctgcctgtctcccataagggagaaattcatatttcgtcaggttctaattgacaacagaacaaatgttcgatataattattgcatcgctacattaggaaaaatgttaaacagaaacaactagaaacagtaataaatcagtgtttggtcagtttgactttccctttggctggcctcttaaatataggaggcgtaaagatgcaagaaagattagaagttggctcacacgtttttattattgaaagcaaccgtactatcacggaagtggtggtagcagcaagacgaggggatttttatacggttcgattactgaatggcggtgctattcagcttagacgaagcagaatctttcctacaaaggaagaggcagaaataaaaatcccagtcagagcagaagtgaatcgtagatttcgctctccatatgattacggtatgtgattggagggtggaatcatgaaggaagaaatacatgtagcttgtccatgctgcagaaataagcggttgttcgatgcagacccggatacagagggcattatcaaaatcaaatgtcccatttgtagaagtgtagtagcagtcagctttcataaaaagaaaattcgtactgagcgaatcgccacacagtaagtagtgagcaaggcctgacgaagtataggtgttaatagcacctgtattttgtcaggcctttttctttttgcctgatttacaaaaacagtgcaatttcatttttataaggagaagtaataggtaagcagaccggaaaaatcttcatcaaagatacttaggaagataaagggattgaaatattcggcttgtaataggaagagcttttggggattgatcagagcctgtatccgtggatgctggttctgatgggtgtccagaagacatcacaaaaataaaaattcatatcggccacatgatgcgcagtgaggcaggatacgacatatcgcatttttgacagttgcaataaaagcaacggcaaagtgcggatgtgggtacccttgtttagctgtgcattttttatggggtacgtcggtcaaaggtttcggacaagtcctgtcttcactgtctctcggccagaaagagaggcaatcaatgaaaatcagaaagacaaggcaggacagaagagagacttacagatatgaagtatatctggaaaatgacaacggggaatacaccaaagagtgtatcgaactgaaaccgggaacggatggtgtgacggaggcatggattaaaacgcttcattcactggatgaccacgaggtgtatctgaattgtaaaaatggacatctaccacttacagatgcagaaaaagcagctaagagaaagtgggaacgggaacatgagggggagacctatggtgtgggctggaatctttctctggaccatatggttacggatgatgaaggaggtacggataagagttctgtattaaaaagtgcctgttacatgatggatgaagacgttccggcagatgttcagcatcttcgtgatcttgtggagaccatgacagagaagcagcagttggtgtacaagctccatattctggagggttattcctttacggaaatcgcaaagctgatggggacaagtattccaaatgtgaagaagcattatgataaggcgattctgttcattaaaaataatttttaaaaattttttccatgaggttaaaaagaggggtgtttcctttgcctgtgacatgtaagggataaggacttacagaaagcgaggtagtcaacatggcattaaagcacaagattacgattaacgtcacagatgccaaaggcagacacacgactgttcttcgcggtgccaaaagaagcataccggaaagattggtaagattcctgttcggggattttacacaggtttatcttctggcaccgggacagacagttgaatccgtggatgtccgagaagtcaaagaaggaggaagcacctaatgggaaaaatgagtgaactggaaatgatggtcaaagaattgcgtgggtgcggagaaaaactgattcgcatggcagaggaaatgacagagatgttctcagcatccgtgcagagtgaaccagaagaagcaccgaaaaagcagttgtcacttacggaggtaagggcagttctggcagaaaaatcccgtgctggttttacaaaggaagtgaaagcacttcttatcaaacacggtgcagataagctgtcagaaatcaatccgactgaatatgaagcactgcttgcggaagtggaggtgctgggaaatggctaaacatgcgttgctatcagcatcctcagcacatcgatggctgaattgtccgccttctgcaaagctcagtgccacatatcaggatatgtccagtgaatttgccagacagggaacggatgcccacagcctgtgtgagtatcatttgcgaaaggcattagggatgccggcagaaaatcccacggaaaatctgactttttatgatcaggagatggaagaatgtgcgcaagggtatgccacttatgtgatggaacaggtggagaaagcaaaacagacctgttcagacccggtggtattgattgagcagagactggatttctccagatttgtggaagagggatttggtacgggagactgtgtcattatttccgacggtacattatccgtggtggattacaagcacggtgtcggtgtcctggtcagtgcagaagagaatcctcagatgatgtgttatgcgttgggagcattggaattgttcgatggaatttatgacattgatacggtgtccatgacaatctatcagccacgaagggaaaatgtcagcacctgtgtcatgacgaaagagcggcttttggaatgggcagagacagtattggtaccgatagcaaaactggcttatgtgggagaaggcgaatataaagccggagatcactgtcagttctgcaaggcaaaggcagtctgtagaaaacgtgctgaatataatctggaacttgccagatatgattttgagatgccagccactttggatacggatgagattgcatacatcctgacaaaagcggatgagttggcaaactgggtaagtgatgtaaaggaatatgcattgcaacaggcactcagcggtacgaattataacggatttaaggttgtggaaggtagaagcaaccgaaagtatgtgaatgaagaggcagttgcccaggcagcagttgccgccggcttcgacccatacgaaaagaaagtgcttggtattacagccatgacagctctgatgggcaagaagaaatttgaagaagtgcttggcgggtttatccataaaccttcaggcaagccagtattggttccattgtcggataagcgtccggctatgaatacagcacaagatgattttaaggaaaattaggaggaaaagattatgtcaaaattcaacaatccaacaaaagtaattacaggacctgaaacaagatggagttatgcaaatgtatgggatgcgaagtcaatcaatggcggtgcaccgaagttttctgtatccctgattattccaaagtctgatacaaagacagtggaaaagattaaggctgcgattcaggcggcatatgaagagggacagagtaagttaaagggtaatggtaagagcgtaccggcactctctgttatcaaaacgcctctccgtgatggtgatacggaaagaccggacgatccggcttatgcaggatgttattttatcaatgccaacagttctgctgctccgggtatcgtagatgcagaccgtcagccgattcttgaccgttccgaagtttacagcggtgtgtatggcagagcttctatcagtttgtatgcatttaacagcaacggaaaccgtgggattgcctgtggccttaacaatctccagaagattaaggatggagaacctttaggtggtaagtctcgtgcagaagatgattttgcaacagaggtggatgacgatttcttaaactaagtgacaaataaacgggcggtggcaatccgccgcctgtaacaagaaaagaggtaaaaatttatgacaaatattattttagtggtacttgcagttgtgtggttagttctgatgattggtggttggggattcatgatttacaaagatattcgtgatgatatccgtaatgaaagagaacgcaaggcgaaattggaaaagaataaggaataatgattgcggaggcggtggcgatatgctgccgcctctttgccgtggaggaatttgtatggaaatgataaaagagatgtcgattgatcttgaaacttatagtgacgtggatatcaaaaagagtggtgcataccgatatgtggaatcaccggaatttgaaatattattatttgcagtatccataaatggaagtccggttgtggtatatgatatggcatctggggaagtattaccagataatattattcaggcactggtggataattctgtgacaaagtgggcatttaacgctgcatttgaaagaatctgtctgtcagagtacctaagacgtgagttcccaaagatgatgaagagtaaatatctttgtccggacagttggaaatgtagcatgatttggtctgcatatatgggattgccattatctctggagggagccggaagtgtgctcggattggaagaacagaaactgaaagagggcaaagacctgattcgctatttctgtgttccatgtaagccgacgaagaccaatggtggacgcaccagaaatcttccggttcataattcggaaaaatgggaactgttcaaggcttataataaacgagatgtggaagtggaaatgtccattcagcagaaattgcataagtttccggttcctgattttgtatgggaagagtatcacatggaccagtgtatcaatgacagggggattgctctggactggcaggtggtggagaacgcgattcagattgatgctatatcaaaggaagagttgctgtctgccatgaaagagattacaaaactggagaacccaaacagtgtgctccagatgagggggtggctgttggagcgaggagtagaaacagattcactagataaaaaagctgtggccacaatgatgaaagacgtggatgcggaactgtatgaggtgctgtcattacgacagcagattgcaaaatcttccgtgaagaaatatcaggctatggaaaatgtgatctgtgatgatggaagggtgcatggaatgttccagttctatggtgccaaccgttcaggaagatgggcggggaggctgattcagttacagaatcttccacagaaccatatgccggatttggaagaggcaagagcacttgtgaagtctggagattatgaagccctgtccatgctttatgattccgtaccaaatgtattgtcagaactcataagaacagcatttattccgaaagagaattgtaagtttgtggtagcggacttttctgctgtagaagcaagggttctttcatggctgtcaggggaagagtggagaacagaagtattccgtaacaacggggatatttattgtgcgtctgcttctgccatgtttggcgttccggttgaaaagcatggtgtgaacagtcatttgagacagaagggtaagattgcggaactggcattaggatatggcggttctgtcggtgctctgaaatcaatgggtgcattggatatgggattaaaggaagaggaacttcagccacttgtggatatgtggaggcagtccaatccaaacattgtacagttctggtgggatgtggatagggctgtgaaatttgctgtaaaaggtcgaactttgtcggaaacgcacgggattcaattctgttaccagagtggaatgctgtttattaaattgccttccggacgcagactttgttatgtaaagccaaagatgggagagaaccagtttgggggagagactgtgacatatgagggtgtcggtgctacaaagaagtgggaacgtattgaaagttatggtcctaaatttgtggagaatatcgttcaggcaatcagtagggatttgctctgttattctatgagaaggctgaaagattatgagatttgtgcgcatgtacatgatgaagtcattgtggagtgcgggatggatgaatctttggagattgtctgcaaactgatgggagaagcgccaccgtgggctaaaggattggagcttagggctgatgggtatgagaccatgttttacaaaaaagaatagaaaaagagtacaatgtgtatttggaaaatcaataaccatgtgatagacttaataaagaatacacgttaagaggtgacttgataatggcaaataatagagaaaaaaagcaatttcccttgattgataaaaaaagttgtatcatatatttatataaaattatttcatcttgtgaaatttgcatggatacatttaaaacctacaatctacagacggaatatgaattgaaaaaattcaaaaaaggagatttgattccaatagagatatatcaagatatatgtcataaaacatataatgtcatggaatacattttgaatttattaggtgatgcccagacatcttctatatcatattttaaatatagaaacttgatacaaaaaagaattaaaaagggaatgacagatatacaaatactacctcatagtgaggaaataacagatcttttgtctgaatttaacaaaatgcgaaattggctaaatcatgtaccagagtcattattagtttcagaaatggaattagtaaataatggaaaagcagaattgcctttgaatcctgtaataatcgtacatcataagtttgcttcgtatgaatattttgaacatttatatttatctaatgttgatttttgtaaaaaagcaagaaaaattattcaggcagctaaaagagattattctctattagtgggagagtcagtgagttaccaaagagtatattctgatgaacctataggaataggaagtgccgaggcggcaaaaatgtctgctaaaattcaaggactcaaagaagaagagtaacacgaaggaagctgtttttaataaatagcttccttcgttataaatattaggcgactgttcgagaataatcagtaacatatgtttgattttctgcaagagtaacaccaagatttcttgcgatttctagttgcttttctgatggtttttgaccaagtggtagatttctaggatgccccggtacatgactggttttaacggatggaaactcgataatatttgtaggagcagattttgcttctgaagaggtgatttctttgtatttacttaaagtacgagggatattttcttttattttggcaatgtctttagagggaattttcttataaataagaaatcctgctattgcagtaccaagtaatacagaggtgattataatttccttcttgtggtgtttgatttcttcaaataagttgttcttttcattggtttgtttaaggtttgtaggtgttggcataaggacctccttttgacaggtgattttatatatgttacaatccaagtatacgacaaggttgtcggatattcaatgatttgtgagtcaaaatagatacgacaacatttgaaatttgtctgcagtggaggtaaagatggcttataaaaaaagcaaaaaagcatcgtttgacaaaaattgtgtaatggaagcattacatcttagagggagtagtataagaaaattagatgatgcatatgaatttggctggtcttcaaaatctgttgaaagaggattaagagatggagaagtttcaccagatcttttagatgcattagggagatatctcaatgtcgagcctgattatttagcggggaagtatcatcgagaatgtgaaaaggtaaaagacccgtttataagagaaatatggataaggtcattaaaggcagaaaaatatccatacattttgaaacaacagaaaactaagattgaagggaaattcctatatgataaatatatagaatatgttctgactattcatgatatatctatggaacaatttaatagtatggaaggagaaaaaagaagagatttccaaattgcattagaaggtgcaattgctccgcttcttatcaaatattttccgcagaatgcatttggaaaggatacatggccagatgtttatagattacaaagtgaaatagaagattatggaatagatgaaccggaattaccagaagatttttgggatgatgaaggagaggatagatttaaggctaaatatgataataaataatttttctgccaggttaaaatctggcagattttttttgcctgtgactcagagggggaattgtacccttctgaattttttcatttttacaggaggaaagtcgaatggaattattgatttttacagcaaatcagacaggaaacaaaaagaactgctattacccaaacagagtagtggcgaagaatgctgcagagttgcagaaggctgtgatgatggaccatgtgtgtgcagagtaccgcaatgattacagaagcaatgccaatttcatgcagtctgtggtggtagtgatggactgtgataatgaccattccgaacttccgggggactggatgactcctgataagctgaaagccttattgccgacggtagcatttgcgattgctccgagccgcaacaacatgaaggagaaagacgggaaaccggcaagaccgagatttcatgtctatttcttcattcatgccattactgattcatcaaaatatgccgccttaaagcgtgctatctggaaacgctttccgttctttgatggaaatgctctggatgcaggacgcttcatttatggtgcggatgccggagagtgtatctggcatgatggcggtacattgattgatgacattgtgactgtggaagaaagcgaacatggttcctatgacagcggtgtgattccggcgggaatgcgtaacagcacactttcaagattcgcgggaagagttgtggtccgttacggagcaaccgacaaggcttatcagattttcagggaagaagcaatgaaatgtgatccgccactggatgaagaggaactgggtgttatctggaacagtgccacaaagtttgcaaagaaggtacaggaacaagaagattatgtgtctccggaagagtatgaggatgattttgctccggattctttgaaaccatcggattattccgatatcggacaggcaaaagtgcttacccgtgagtatgggaatgaactgcgtttctccacagctacagattatcttcgttttaatggtgaatactgggtggaatctaaacaacaggcagtgggagccatggaagagtttctggatttacagcttcaggacgctttggatgcagagggatgtgccatgaaaggtatggttgctctggggtttgatgaggatgcagtcagaaagggcggcaagaaatttgaagaattgctcactgaggatgaagaaaaagccgcttatgcagtttatcaggcagcagtcacctatgtgaagttcgtgatgaaacgccgtgacatgaaatatgtggtgtccgcattacaggcggcaaagccgatgttggaggttcagccatcggatttagacagaaacgaatttcttttgaatacaccaaacgcaacctattatctgccagatggtcttagtggcatgaaagcacatgatgccgctgacctcatcacaaagagtaccttagtgtctccgggggatgatggcagacagctttgggaagaagctctggatttatttttctgtggtgataaagaactgattgagtatgtgcagaagattgtgggtctgtctgccatcgggaaagtatatgtggaatccatgatcattgtatacggagatggccgcaatggtaaatcaaccttctggaactctatctccagagtgttgggaacatacagtggttccatgtctgcggatgccctgactgtggggtgcaagagaaatgtgaaaccggaaatggcggagcttaagggcaagcgtcttatcattgctgcagagttggaagagggaatgcgtctgaacacatctgtcatcaaacagctttgttctacggatgaaatcagtgctgagaaaaagtacaaagatccgttccgttttattccatcacacacattggttctttacacaaatcatcttccgagagttggtgccaatgatgacggtacctggcgaagacttgtggtcattccgttcaatgccagaatcgagggcaagagtgacgtgaagaactacacggattatctggtaaagaatgctggtccggctatcatggcatggatcattgaaggagcccagaaagcgattcagcagaaatacaaatttgatgtaccggcatgtatggatgctgctatcaaggcataccgcgagaacaatgactggcttggtgcgtttttggatgaatgctgtgaactggacagttcctatacccagaagtccggggatttctattctgcatatcgtgcttattgcacaagatgcggagagtatgccagaagtaccacagatttttattctgccattgattctatcggacttaccagaaagaaaacgaaaaaaggtgtgttcattaagggcgtaagactgaaagaagaagaggattttctggactaaatcctgaaagggtggtggtcagttaaggtcttagtaagaagtttcttatagagagttttttagtaaaaaaatgctataagagggttttaagaaatgactgtcccagaccaccacccctaataaatttgatggaggaatggcatgagagaacgagagattgaaagaaaattggtatcggctgtaaaaagccgtggtggaatatgtccgaagtttgtttctcccggatttgatggaatgccagaccgggtggtgttgcttccacatgggaagtttggatttgtggaagtaaaaagaccgggagaaaagcccagaccattacagatagcaagacacagactgttaagaaaacttggttttttagtatttgtattggatggagaggagcagattggagggatgattgatgagatacagtccgcatgagtatcagagatttgtgattgattacatcaagaagaatcccattgcagcagttttccttgatatgggacttggaaagacaagtatcacgctgactgccctgaatgacttactgtttgacagttttgatgtccacagggttttagtggtaacaccgctaagggtcgcaagaaatacttggtcatcggaaataaagaaatgggagcatctacaggatttgcaatattccatagtggtgggtaccgaaaaagagagaatgacagcactggagaaaagggcagatatttatattatcaaccgtgagaatgtacagtggctggtggaaaagagtggaaagaaatttgattatgacatggtggttgtggatgagctgtcatcttttaagaaccatgaggcgaaaagattccgtgcattcatgaaggtcagaccgaaagtgaaaagaattgttggtcttaccggtacaccatccagtaatggattgatggatttatttgcagagttcaagctgcttgatatgggagaaagacttggaagattcattggtgcttacagagctaactttttcagaccggataaaatgaatggtccaatcgtgtacagctacaaaccaatcccaggagcagagaacatgatttataaccgtatttctgacatcaccatttccatgaaggcaacagattatctgaaaatgccggagttggtatcttccagatatgaggtgcagatggatgatgcggaaaaacagaagtatgaggaatttaagaaagatttggttctggagattgaggatggggagattacagcggcaaatgcagcttcactttccggtaagttatcccagatggcaaatggtgcggtgtattccgatgatctgacggtgatgcagattcatgacagaaaactggatgcattggaagacattatagaagcggcaaatgggaaaccggttctggtagcatattggttcaagcatgatttgaccagaatcacggaaaggcttagaaaactgaacgtgatttatcagaaattggattctgatgagagtatccgtaaatggaatgccaaagagttacaggtcggtcttatccatccggcttctgcaggtcatggattaaatctccagagtggcggatctacaatggtgtggtttgggcttacatggagtttggaactgtatcagcagacagtagccagactttggagacagggacagacagagaacacggttgtcattcagcatattgtgactgcgggtactattgatgaaagaatcctgaaagcactggaacagaaagacaatacccagtccgcattgatagatgcagtgaaagcagaggtgagtggatatggcaactaagaatctggcagagaatccatatgaaagacttgccaatgcaatcatcatacaggcatccaaagattatatgacaagtcttaggaaaaagaaacgaaatccggggagtgcatcagcagagcatgatatcagggaatgcgaacgatttttccgttccggttggtatcaggttctgacctccgtggatggagagtatttaatagccaaactgagaaaagcaatatgacaatcagagtcaatccgagggaaataaatttccaatcggaggtacgtgatgacagcaaaagaatatttaagtcaggcactaaatattgacaggagtatcaacagtaaattggaacaggttgcttccttgcatgaactggcaacaaaagcaacaaccctgatgtccgatatgccgggaagtcccaacaggaacattcacaagatggaagatgccattgtgaagatggtggaactggaagatgaaatttattccgacatccacagactggtggagattaagaccgacattaccagacttatcaagcgtctggggaacagggatcagcagcttatattggaacagagatatttgtgttttcgtccgtgggagcagattgcagtagatctggattacagtatccaacacacattccgcatccatgatacagcagtaaaagaaattgcaaaatttctggaagatgagagttgatgtgatagaatgagagttcttatttatgatattgttatactgacgaaagaaacaaaatgacagagagccattgcagagaaatttgcagtggcttttttcatgaggagaatgaggtgataggatgccgagaaaaccaaagcgtccctgttcccatcccggttgtccgaatctgactgatggcaggttctgtgagaaacatgccagacagcacaatcaggactatgagaagtatgaacggaacaagtccaataagagaagatatggcagagcatggaaaaggattcgtgataaatatgtatcacagcatccgttctgtgaggtctgttatgaaagaggaatcttagtggagactgaggaagttcatcataagaaaccgttgagtgaaggtggtacacatgaaagagataatctgattgcattgtgcaagtcgtgtcactcaaggattcatgcagagcgtggagaccgtttcaattccaaccgtgaatacacctactgatggggtagggggtatcgcaatctctatgggttagccgataggggaacgacgcgggggtatcacgcacaaaaatgggatttcaaacagggtatatcaaacgatttcaaaggaaatcaaagaaatcaaacggaaagcaggtgagggacatggccaaagacggtacgcgaagaggcggtgccagagccggtgcgggcagaaagcccaaagcactgacagacaaaatcaatgagggcatcagtgccacgatcattgaactgccggagactccgacaatggaaggcgttgatgtgcctccggtaaaagattatctgaaaacaaaacagaaaagtgggaaagacctgtgtgcagcagaagtttttgaagagacatggaaatggctgaaagcaagggggtgtgacagattggtaagtacccagttggtggaacagtatgccatgtcggtatcccgttggattcagtgcgaggaatgtatttcagaatacggatttcttgcaaagcatccgacaaccggaaatgccattgcttctccgtatgttgccatgtcacagcagtacatgaagcaggtcaatcaggtctggtatcagatttaccagattgtaaaagaaaactgttccgtggaatggcagggagcaacaccacaggatgatgtgatggaacgactgctcaggacaaggaacggatcataggaggcaggaacaaaatgggagaaacaaaatattttttgatggaagtcgataagttgattccttatgcgagaaatgccagaacgcattccgaagtacagattgttcagattgcggcaagcattaaggagttcggtttcttgtcgccggtcatcatttcaaaggataacaccatcctgtgtggacatggaagatactatgctgctcagaaactggggcttgaaaagattccatgcattcaggaggaatatctgactgaggctcaaaagagagcttatatcctggcagataacaaaatcagccagaatgccggatgggatgaagaactgttaaagattgagattgcagatttacagggagaggattttgatgtttccctgaccggttttgaggattatgaaatcacggatttatttgcagtccatgaggaacacccgcatgaagaaaaacaggtggaaaataaagagtatgacgaagaggagtttggggatgaagaatttgaacacgaatgtccgagatgcggattcaaatacaactaaacaccgcttcccgtggaaatggagattatccgacctgaaagatgtggagaagaatggcaaaaaggtatttagctgcttctcctgtggcggtggttccacaatgggatataaacttgccggttacacggtggtcgggaactgtgagattgatgaggatatggaagcgatttataagcagaaccatcatccgaagcatacctatctcatggatatccgagatttcaaccgtttaggaacttatccggatgagctgaaggagttggatattctggatggttcgccgccatgcagtgtgttctctgatgcgggagcaagggaaaaaggctggggtacggaaaagacattccgtgaaggacagaagaaacagagattggatgacctgtttttacatttcatccatacagcagaaatattaaaaccaaagattatcattgcagagaatgtaaaaggtctggtggccggtaacgcaaagggatatgtcaatgaaatcatcaaagcatttaagtctgccggatattccgtgcagatttttcttttggatgcccagacaatgggtgtgccacagagacgaaaaagggtgttcttcattgcaaggagaaatgacctgaatttgcctaagctggtactggattttagggagaagccaatccacttcggagaggtcagaagtgctcatggtattccacttaaggaatgtatgatggcaagcctgattaagaagagaaagccgggggataaatgcttttccgatatttccgaacgtgtgcgtggaaaaaggtctatgttcaatgacaggattgtggaagaccacgtgatagctccgacaaatacatccggtgggatgagcgttagatttgtggatggggagaaatattccgatgcagattacattgcaacccagacattcccacaggattatgattttggaaaagaatctgtccagtatgtgtgcgggatgagtgttccgccggttatgatggcacagattgcatccgctgtgtatgagcagtggttaaagggtggtgtttgtgatgaggaaactgaaaaaatataagccaacaaagttcatggctgaggattctgtgtacagcaaagaactggcggattatgcagtttcctttattgaatgcctgtgtcacacgaaaggcacatgggcgggcaagtcatttgaactgattgattggcaggaacagattatcagggatgtgtttggaactatcaagccaaacggctacaggcagttcaacacagcctatattgagattcctaagaagatgggtaagtcggaattagcggcagcagtcgcacttttgcttacctgtggagatggggaagagagagcagaggtttatggatgtgccgctgacaggcagcaggcatccattgtatttgaggttgccgctgacatggtgcgtatgtgtccggcactgaataaaagagtgaagattttggcatcccagaagagaataatttaccagccgacgaacagcttttatcaggtgttgtcggctgaagcctattctaagcacggttttaatatccacggagttgtgtttgatgagctgcatacacagccaaataggaaactgtttgatgttatgaccaaaggctctggagatgcaagaacacaacctttgtattttctgattacaacagccggtacggatacaaacagtatctgttatgaaacacaccagaaagcaaaggatattattgagggaagaaagattgacccaacattctatcctgtgatatatggtgcagatgagaatgatgattggacagacccagaagtatggaagaaagcaaatccatctcttgggattacggttagtattgataaggttcaagctgcatgtgattctgcaaaacagaatccgggagaggaaaatgctttcaggcagttaagattgaaccagtgggtaaaacaggcagtccgttggatgccgatggaaaaatgggatgcgtgtgcattccatgtaaatgaagacgatttggaaggccgtgcatgttacggtggtttggacttatcctctaccacagacattacggcttttgtattggtctttcctccgagagacgaggatgacaagtttgcaattctcccttacttctggattccggaagatacgttggaactgcgagtcagaagagaccatgttccatacgatgtctgggagaagcaaggatttcttatgaccacggaaggcaatgttgtccattatggatttattgaaaaatttatagagagattgggcgagcgtttcaatattcgtgaaattgcctttgaccgttggggtgctgtacagatggtacagaaccttgaggggatgggttttacggttgttccatttggacaggggttcaaagatatgagtcctccgacaaaagaattgatgaaactgactttggaacagaaacttgcccacggagggcatccggttctccgttggatgatggataacatttatatccgcaatgatccagcgggaaatatcaaagcagacaaggaaaaatccacagaaaagattgacggtgccattgcaactattatgggactggacagagcaatccgttgtggaaatgatgtcacagcatctgtttatgatgagcgtggtatcttgtttatttgagtataaaaaggaatagtcgaactgtttgtttagtgctattataagtagtaagttagaaataatcacgtaataaacaggagacgaaaaatgactattgatatgaagttttttaatgtatattatttctgtcatttggcaaatgaaagtatgggaaagtttgattatgcttcaactaatgcagaatttatagaaagacaatttgaagttgaaccagaggattttcctagaacatcggtattgagagaatattgttggtggctggtggacagggtattttacgaacaggcaaatcatatagcacaaacagaagaggttgcagattttaatccgattgcctggattaatcaagcaatcatgaaatataaaaatattaatgtttcatccctaaaaaagtttgagtgtaacgaaaatgattttttagagaagtttaatcaatatattgagtttttggatactgtgtgcgaagatttgtattttgaaattattggtgatattgctattgaagttgaatttattttgtttcaaaacagagattttttgcttcgtttcaatgatcaagtggctgtcatgtttcgtgaacatcctcggaagagggcttatgtgccggaatgggtaaaacgagcagttttgtttagagacagaggttgctgtgtgttttgcaagaaggatttaacaggattgtattctctattggaagataatgagaagcattttgatcatatcgttcccttaaatgaagggggaataaatgatgtttgcaacatgcaattatcctgtcaagattgcaatctgtcaaaatcagataatagtatgacaagttcattgtatcaaagtgcatattaagagagaagcatctatcagaaatggtaggtgcttttcttatgcttatttttaaggaggattgatgattatgggaatcttaagtggaatttttaagtcaagagataagccacaaaatgcaacatccggcagtgcgtaccgattttttatcggtggtagttccagcggaaagaatgtcaatgagcgttctgccatgcagatgacagcggtgtattcctgtgtgcgtatcttatcagaggcggtggcatgtcttccgcttcatgtatacaaatacaacggagatggcggaaaggagaaagcggtaaaacatccgctttattttttactccatgatgagccgaatccggagatgacttcctttgtgtttagggagacattgatgacacatttactcctatgggggaatgcctatgctcagattatccgtaatggtaagggagagatcattgctctttatccattgatgcccaaccgaatgacggtggacagggatgataaaggacagctttattatcagtacaataccagtaaggatgatgcaccgaccatgaaggggagtatggtaaatttgaaaccatcggatgtgcttcacattcccggtcttggatttgatggattggttggatattctccgattgcaatggcaaagaatgcgattggcatggcgattgcctgtgaagagtatggtgcaaagttctttgcgaatggtgccacaccgggcggtattctggagcatccgggaaccgtaaaagacccacagagggtaagggaaagttggacatctgcctttggtggaagttccaatgccaataaggttgcagttctggaggagggaatgaagtacacaccgatttccattagtccggaacaggcacagtttttagaaacaagaaaatttcagataaatgaaatagctcgtattttccgagttccgccacacatggtcggggatttggagaagtcgagcttttctaatatagagcagcagtctttggagttcgtgaaatacaccttagatccctgggttgcaaggtgggaacaggcgattgtccgttccttattttctgcggatgagaaaacacaatacttcgtcaagttcaatgtggacgggttgctccgtggtgattatcagagccgtatgaatggttatgccatcggcagacagaacggttggatgagtgccaatgatatcagggaacttgaaaatcttgaccgtattccggaagaggaaggtggcgatctgtaccttatcaacgggaatatgaccaaattaaaagacgcaggaatatttgcgggaaaggagagcgaaccgaatgaagaagttttggaagtggaagaaccacaaggttctgaatcaggagacacagacggaaacggtggagagaacactgttcctaaacggcaccatcgcagaggatagctggtttgatgatgacgtcacaccgcagatgttcaaggaagaattgatggatggaagtggaaacattacagtctggatcaattcgcccggtggagactgtgtggcggctgcccagatttataacatgctccgtgagtatgagggcaaggtcacagtcaagattgacggcattgcggcatccgcagcttcggtcattgccatggccggtgacagggtgctgatgtctccggtatccacgatgatgatccacaatccgatgaccattgcatttggggattccggggaaatgcagagagccattgacatgttgaaaagcgtgaaggattccatcatcaatgcttatgagctgaaaaccggaatgtccagaacaaagttggcacacctcatggatgcggaaacatggatggacgcaaacaaggccattgagcttggatttgcagatgaaatcatccagagaaatggtgctgtggatgagatggaaatgcaacaggtatccatgctgtattcaaaaacagcggtggtcaattccttaatggataagattgctgagaaatgcaagatacagcagaaaaatgaaactgaaaatagtaacaaagtcaaagccgattccctcatggatcgactttttttaatgaaaaattggaggtagaaagttatgactattttagaattgagagaaaagagaaacaaagcatgggaagctgcaaaggctttcgtagaaacaaaacgtgataaggatggtctgttatccgctgaggatgcagcgacttatgcagagatggagcagaaggtacagaattatactgctgagattgcacgtatggaagagatggaggctatggaagcagagctgaataagcctgtgaatactccaattaccggtaagccgatgaacggtggcaaggctcctgaaaagaagacaggccgcgcatctgatgaataccgtgatgctatgctccatgcaatccgtaacaacttccgcaatatcagaaatgtgctttctgagggaattgatgcggatggtggttacttagttccggaagagtacgattccagattgattgaaggtctggaagaggaaaacatcttccgtagactgggtacaaccattacaaccagtggagaacgcaagattaacattgcaggttctaaaccggctgcagcatggattgatgaaggcgaggcattgacttttggtgatgcgaagttcgaccagatcaatctggatgcccataaacttcatgtggctgtaaaggttacagaagagttgctttacgacaatgcatttggcttagagaattacttaatccgtcagttctccagagcattggcaaatgcagaagaggatgcattcctcaatggtgacggtaccggcaagcctcttggaatttttgcagaggtcggcggtggagaaatcggtgtaactgctgcgagtgcaaccgaaatcacagcggatgaaatcatcaatctggtttacgcattaaagcgtccttatcgtaagaaggcaaaattcattatgaatgatgcgaccattgcggcacttcgtaagctaaaggatgaaaatggtcagtatttatggcagccttctttacaggctggggaaccggacagactctttggctatgaagtaatgacttctgcctatgttcctaccattgcagcgggcaagcctgttattgcctttggtgatttcagctactacaacattggtgaccgtggggttcgttctttcgcagaacttaaggaactctttgccggaaacggtatggtcggttttgtggcaaaggaacgtgtggatggtaagttagtgcttgccgaagcagttcaggtgcttaagatgggtgcctaattctggaaatagggtggtgtcggattagtctggcaccatcttaaatgcggaggtggaaacgtggtagtaacgttggatgaaatgaagaaatatctgcgtgtagactttgatgatgatgatgttctgctccgtaatattatggaatctgcccagaccttatgcatggatgtggcaagaatcacggatgaggatgtttttgaggaagagccttgtgccagaattgcagtcatgtatgcggttgcgtatctgtatgaacacagggaagaagcagattatcatgcattaacattatcactccgttctttactctttgggtgcagacaggagggattctgatgaaggtatcttttttgaatgagaaaatcctgttccagaagagtactgtggtgtcggatgccattggtaaccgtaaaaatgcctgggaagattattattcctgttttgccaccattggtggggaaggtgggaatgagaaatcagaagccggtcagacagtggatggtgcaagtattacatttacagtcaggtattgcaatcaacttgtgggcatcgtgtccgcaggtttccgcatcctgttttgcggggagatttacaacattctttccgtagaccacatgaattataaaaagaaatctttgaaattccgatgtgagaaagcgaggcggtaaaagtggcgtccacagtaaatatcaacgacatggcagatgtgatcatgcaagggctgacagaatttgcagaacttgccacggatgatatgaaagaagctgtgaaacatgcaagtaccacagtccgtaaggagataaaggcaaatgctccggaggaaaccggaaagtatgcaaagagctggacagcaaagaaggtcagggaaacatcccagactctgacaatggtggttcattctaagaaccggtatcagcttgctcatcttctggaatatggtcatgccaaaagaaatggtggcagagtggaagggaaagcccatatcgcaccagcggaacagcatggaatcagacagttacaggaagagatagaaagagcactgagaggttaggagatggaagaattattacagattttaagtgaaacgcagattccctttgcataccatcactttgcagagggggaatcaccagagccgccatttatctgctatctgcttccgggaagcaataacttctcagcggatggcaaggtctattacaagataaatgaggttcatatagaactgtacaccgatttgaaagatttggcggtggaacagcagttagaggatgtgttggatgaacatggaatcttttacaacaaatctgaaacttggatagagagcgaaaagctctatgaagtcctttacacatttgagatggaggtatagagatgtcagagaaaaataacaaagtaaaatataatctgaaaaatgcacattacgcattactcaccattgcagaagatggcacggtttcctatggagatccgaaatccattcctggttcggtgtctatttcactggatgcgaacggagaaccggaaaacttctatgcagatggtatcgcctactatgttatcaacaataacatggggtatgagggagatttggaacttgcacttatcccggaagatttccgtacagaaatcctgaaggaagagttggatgataacggtgtgctgattgagaatgcacaggtggaattggagtcctttgcattactctttgagtttgatggtgaccagagacatatccgccatgtgctttataattgcgccgcatccagaccgggtatcgagggcaagaccaatgaggataccagagaggtacagacagagacgctgaccattaaggcaacaccgctttccagcggtcttgtgaaagcaaagaccggtaataccacagacacaaccgtttacaatgattggtacaaagctgtgtatatgcctttagttgcagaagaggatgaaggaggcgtggcataatgagcatgattaagcagattgaaattgacggtaagcaggtgccctttaaggcatctgctgccattccgagaatttaccgcatgaagttccagagggatatttataaggacctgaaagcattggaaaaatctattggagatagcagcgaggaaagctccaatctggacatgttttctttggagatgtttgagaatatcgcatttgtcatggcaaaacatgcagatgcaagcattccgaacacaccggaagagtggctggatgggttcaatactttttccatttatcaggtgcttccacagctcattgaactctggggattgaatgtgcagacggatgtggaagctaaaaaaaacttcgtcagacagaccgtgaaatgacaacaccgttgtttctgttaaggtgtgtgcagttaggcctgtcgatggcagatttggagctgctgtcgataggacttatcaatgacatgtatgccgaaagcaggaatgatgattgtaagtatgcgacattggctacacaggaggattttgacagattttaagttgcttcagacgaataaagagtattcccaatgctttatgaaattactgttgggaataaaggttgggaataaaacggttggtagttgcaggggattgagaaatagatctttttatagtatgattattctcgtgggtagaggttcacgagaatttgaagttggaggtgaggtttcatgcaggatatagttgcaaaattgactgcaaaggatgataaatatgcttgtgccattgctgataaaattatttcagaaagtcaagatactgacgaatggtatgaatactttgatgattttgcttctctgcttaatcatccaaagtcattggtaagaaaccgtgtgatgtacattcttgctgctaacgcacagtgggataatgagaatcgttttgatgcgataatatcagattatcttgagcatgttacggatgagaaaccgattacagcaagacaatgtataaaggctcttgcacaggtgggagtagcaaagccacagtatattccaagaatactatcatgtttgcatgaggcggatttatcgaaatataaagatagtatgcgtccgttgattaaaaaggatattgcagaaacagaaaaaatattgacatcctctgatctataaacaaagtaaaatttcagttctacggagacaaacaaaatagaataaaaaattactttcggcatctgtcagaaaaggcaggtgccatttttatacccaaaaacagaaagtgggtggtggattttgaatgtaaacaaagactggacgggtaacaggaacggtatttataccacactgggagcgtccaatcattctgataaggaaagacagagccatgattattatgccacagagccaaaggcaacggaattgcttctggcagaggaaacttttgctcctgtcatatgggaatgtgcctgtggggaagggcatatggcaaaggtgttggaagagaaagggtatcaggtcatcagtacggatctgatttatcgtggctatggaaatgaggagtcggtggatttcttgcatgaaccggtagcagagtttgagggggatattattacaaatcctccatacaagtatgcgttacagtttgtggagaaagcactggagagagtaaaaccgggcagaaaagttgcaatgtttttgaaactgcaattcttggagggaaagagcagaaagcagttctttttgaagcatccgccgaagacggtatatgtcagttcatccagactgatatgtgccatgaatggggaatttgaaaagtatccgtccagtgcagtggcatatgcctggtttgtgtgggaaaaaggatataaaggaaatccagaaatcaaatggataaattgatggagcagagatgcttctttttttgtgcttaaaatgggaggtgagagaataaatggcaagcagaatacagggtattaccgtggaaatcggtggcgataccacgaaacttacaacagcattaaaaggtgtaaacagcgaaatccgtaatacccagtcacagctacgtgatgtagagaaactgctgaaacttgatccgggcaatacggaactcttatcccagaagcagagattattgaatgaggaagttcaggctacaaaagaaaaactggaagcgttaaagactgccagtgaacaggccaatgccgttttggaacaagggacgataagcaaagaccagtatgatgcactccagagggaaatcattgctacagaacaggcattagaagacttggaagaacaggcggagcagtcagcggtggcattgcagaaaatatctgcaactggtacaaagtttcaggaggttggcggaaagatagagagtgtcggaaagtcacttatgccgatgtctgcggcagtgattggaattggtgtggctggattaaaggttgcaaccgactttgaaaaggcaatgtccggtgttcaggcaattacaggagcaacgggggaagaatttgagaaacttcgtgaaacagctattggtcttggtgctactacagctttttcatctggagaagtcgcagaagcgatgaccgagatggcaaaagccggatggtctaccactcagattattgatggtatggcgggtgtgctggatgcaacagccgcttccggagaaagcctaggaacagttgcgactatcgtagcggatgcgattaccggttttggattgtctgcgaaagactctgcaagagttgcggacttgatgacacaagcagcaaactccggtacaatcggtgtttccgatttgggagagtcttataaatatgtggctccgttggcacaatcaatggggctttccattgaagatgtgacaacagcattgtcagctatgtctatggccggtattaagggttcccaggcaggtacttctcttagaacggtattggcaaatatggcaaagccttctgatacagtggctaccgcaatgaaagatttggggattgagattgccaatgcagatggctcgttcaaatcgttggatgaaatcattactacaatgcggaccagtttcgatggtttgacggatgatcagaaagcctattacgcaacagcacttgctggtaaggaaggaatgtctggtctgatttcgcttttgaatttgacgcaggaagaatatgatgcattgtctgcttctatgaataactgctctggtattgccggagagacagcagcagttatgcaggacaatttacagagcaaggtggaacagcttggcggtgcgttggaatctctggcgattaaactgtcagagtatgtgattccatttttaacaggactggtggaaaagattacagcggcagttgatgcgttcacgaacatgaacccgatggtacagaaggcagttctggtaatcggcggaatccttgctgttgcgggtccgatactgattgtggtgggtaaaatcatatccgcagttggaacaattatgacaattattccgaagctgtcagggatgatcacagcggttaaaacagcctttgcggcactgaatactaccatgcttgccaatccgatattcctgattattgcagccattaccgcgctggtagcggcttttatttatctatggaataccaatgaggatttcaggcagttctggattaacctgtgggaaaacatcaaggaagtggcgatttctgtatggaatgccattaaggagttttttacagcggcatgggaagcaatcagcagtacagcccagaccatctggaatgggattaagaatttcttctcagctctctgggaaggaatcaaaacgatatttacaacggtgttgaatgtgattagcacgattgtgattacctattttaatatctacaagacaatcatcacaaccgtattcaatgcaatcaaaactgtaatcacaacggtgctgaatgcaataaaaacggtcattacaaccgtatggaatacgattaagaccatattcaccacagtcctgaatactattcaatctgtggtgtcaggagcgtttaatgcaatgtggaacggtatcaaaaatacagtatcaggcattgtgaataccattaaaaccggattcaacaatgcagtcagctttatcaaaaatctggcatcagccgcattccagtggggagcagatattattcagggtatcgtgaatggtattaagagttgtattggtaaggttaaggatgctgtgacgaatgttgcagagacgatccgttctttcttgcatttctctgttccagatgaaggacctcttacggattatgaaagttggatgcctgactttatgagtggtctggcaaaagggattgaacagagcaaggcagtggttgcaaaggctgtggaaggtgttgccggagaaatggttatcagcccacagatggctatggtcggagttggatatgaaaatagtcgtaatacgactattccacaggaaaatctatccggtattatgtctgcaatcacagatgcactttcgcagataaatgggcagaatggggatatcgtgattccgatttatctgggcggaaccatgctggatgaaatcattgtaaatgcacaacagagaatgaatctaagaagtggaggaaggtaggatggcattttttgaatacttgaaatttgacggaactgtccttcctctgccagatacttatgatgtgtcattatcagcggtggaagcagacagcagtggagagacagaagcgggaaccacacagagggatgttgtccgccagggtgtggtaaccatttctgtctctttttccgtgacagccaaatggctgaaagcactgactgcttattccaaacaggataagttatcggtggactatttcgacacggaaacagcggatatgaagaacacagagatgtatgttgagggatttaaagcgaaactggaaaaggatacttcctacagagggttgtggacagtgtcttttacattgaaagaattttagaaaaaactattgactctaacattacgtcatagtttatggtagaattaccacagagaaagaggggattcactgaaatgatgacagtacatgaagtaagtaaaatatcgagagtaagtatacgtgctctccatcattatgatcatatcggacttctgccggccacagaagtaaccgaagcaggttatcgcctgtatgatgaagcggcgttggagcgtctgcaacacattttgctttttaaggcattggaatttccattgaaggatattaaagagattttggatagtcctgattttgacagaagcaaagccttggaacagcagattcatttgctggaacttcgaaaggagcatttgcagaatctgattgatcttgctcgtggaattaaagctataggagtgaagtatatgagttttgaagcatttgatacaagaaaaattgataaatatgctgcacaggcaaaggcatcttggggaaccaccgatgcatataaggagtatgaagaaaagtcggcaggcagaacgaaggagattcagcagaaattaaatgtagaaatgatgaacatttttgcggaatttggaaaagtcaaagatatggcaccagacagtgaggaagcggttacgctggcaaagaagctgcaggatcatattacggagaattattatacctgtacagataaaattctgttagggcttggagccatgtatgcaggcggcggagatttgaccacgaatattgacgaggtcggtggagaagggacagcattgtttgcatacgaagcaatcaaagcgatgattgcaaaaaagtaagtattataaaatgatagtattgtttgaggcatcagtcattcagttggctggtgcttttctatttgggaggtgttgcttttgtacccggtaagtgaagcgttcctgtcagcggtgcaggagaacacaagaagatattattggactggaagaattaccacaaaggcaggtgtggttcatgagttttcagagaaagacattgtaaagggaagcggatatatttcttcccagtgttgtggaaatacggaaatggaacttggtacagtgtatgctgcggaaatggggattacactgctttctgaaatcgacagatacacactggaagatgcattggtggaattattttatcatctgttggtgggagaagcatatgaaactgttccaatgggaatttatgagatcagtgaagcaaaccgtaccatccgatgtctggagattaaggcatatgattatatgctccgatttgaaaaagattttaatattacggagaccatcggaaatgcgtatgagatcattatgttctgctgtaaggcgtgcagtgtggagtttgcacatacccagacggagattgaggccatgccaaatggctcggaagttctttctatttatgcgaaaaatgatattgaaacctatagggatgtgctgtcttatatcggtcaggttcttggaggtttcttttgtattaaccgtgaggggaaactggaactccgcaagtatgggaatgagcctgttatgaacatcagtaataagcagaggttttcaagcagcttttctgattttattaccagatatacggcagtcagttccaccaatatgaaaactcagaccgcagaatactatgcattggaaacagatgatggactgaccatgaatcttggtgtaaatccgtttctccaatttggtgtggatgaaacaaggaaagaactgtgtgagcagattttggcggatatttccatcattaaatatgtgccttttgattctgaaactattggaaatccggcattggatttaggagatgtattaagattcagcggtggacatgcggatgaggaacagattacttgtatcacattctcacagtgcagaatcggtggaaaacattctcttcgctgtgtagggaaaaatccacgtctggcacatgcaaaatcaaagaatgataagaacatctccggacttctgaatcaggtagatgccggaaagattgggattcatacattttccaatgcatccgcctataccctggcagatacagacacaaagattatcagtattgagtttgccacaacggaagaaaatcatgctcaattctttggacaggtgattgtggatgcggtggcattacagatagagcatactgcaaatgccaaaggcaccatcacgatcccaatgacggagacggatgcagaaacaggagaagtgatagaaaacccgctatctgtggaagtggaacttcctgttacatggtcagaagatggaaaggttctttgttatgtgacatttgaattgaatgattctgtgatcacagtgcattgtccggtggaaacatggcatagtgggaaacacattctttctttatattatccgattgaaagcgtggtgccgaacattacaaatatatttaatgtgtatctgcgaatggaaaatggaacaggcacggttggaatcggagactgtattgcctccatcagtggtcaggcaatggcagcggctccggcatgggatggaaagattgaaatagaagaaaaagctacaaggtttgttattggtggtggaatgaatgtgagaaacatttcggatgtcatccagatggaaacaatggaacttgtacagagagcatatacggatcatgtggctggcagaacagcgattagtgcattctgccgtcctgtgatggttgaataggagggatttttgtgaagttaaaaggaacaatggtcattgaactgacagatgtgaatacttcggaagtggaaacctatgtggaagaaaacatggtgaccaatgcagtgaataacattctggggctgaatccaatggcaattttttatacggaagaggaatattccacaggtcttgtgtggacggacaatctgttaccaatctgtccgaacatgattggcgggattttacttttccccaaagcgttggaagaaaatgtggacaatatttatgtacagtcggataatctgccggttgcatatgcgtctgacaatgtcaattccacagcaaatacagcgaggggaagtttgaacctgacagagagtaaggcactggataatggatataagtttgtatgggaatttacaccgagccaggggaatggaacaatcgcagccattgcactgaccagtgcaaaaggcggtgaaaatggatttggaagcagtgtggcagatgccagtgcatttttacagttgaaagaggtggatattggaaatctcggacttgcaaaacagatggtattgtttgaaacagcagaagttgattttgaaaatgatatcctgtattccatcacatttgaggattccagtgtgcgtgtgaggaaggtgcgtattccaattttcagcattggattgaatgaaaatatcaatgattccacttatacggtattggaagataaggtgattccggcatcagtgtttcagttcttaggaagttacactttgtatggagaatttttggatggccaggatggatattggtatggtttttcaaatgaagaaaattcttctggggatgcgaccatgctctgggtaaagatttccaaaacggattattccattgaggaaggttcatggacgttatccaatgcctatctgatggcagtaggagaacgtgcaacggattccagttatccagaaagaatatgcagatgttgtatgagaaacgggtatctgtatgtaccggcttataataagaagggaatatataaaatcaatgtcagcaattcggcagatgtgaccttgattccattcggttttacttctggggctaagcctctttgtgaatcaggaacttgtgaattgtatctgacgctgattggagaccttatcgttggtgcggattatcagattctggcaaatgatacggtcattaaaacaaaaggaaatcagagactgaaccatgctgcaactccgctgtttcagtataagcattttcttttggggtggggaggtagctacggtaatgagtacagaaccatgtatttactcacaccgtatcttgcaactatcaataatctttcgtcagcggtggtaaagaccacggataagacaatgaagatcacttatacgctgacagaagaaacagaataaacaattatgtgaatgaggcgattggctctttgggtcagtcgcttttccaataccaaaatttaaaggaggattttcattatgaaagaattttggaatgtgattcagatggtgttcactgcggtgggcggttggctcggatattttctgggcggttacgatggtctgctctatgcactggttgtgttcatggtggtggactatatcacaggtgtcatgtgtgcagtttctgataagaagctgtccagtgcagttggctttaagggcatctgtaggaaggtactgattttgatgcttgtgggtattgcaaatcttctggatgtagaggtcattggaacgggtgcggtattaaggactgctgtgattttcttctatttgtccaatgagggtgtgtccttattggagaatgcggcacatcttggcttgccgattccagagaagttaaaggcaatcctggcacagctccatgacagggcagaaggggatggtgatgacaatgaagttggttaagagttttctgacaaaaaatccgtgctataaagccggaaagaagattacagtgaaggggctaatgctccatagtgtagggtgtcctcagccgagggcatccgtttttattaacagttggaacagggcggattatgataatgcctgtgttcatgcgttcattgatggcaatgacggaactgtgtaccagacacttccgtggaatcatcaaggttggcatggcggtggtgcttgtaataatacacacatcggtgtagaaatgtgtgaaccggcttgtatcaaatataacggtggttctacatttacctgttccgataaggcgactgcaaaagctgtggcaaagagaacttatgaagcggcggttgagttatttgctatgctctgtaaagagtataatctgaatccggcagcggatagtgttatcatcagtcatgcagaaggtcacaagagaggtatcgcaagcaatcatggagatccggaacatctctggaagcagcttggcatgggatatactatggatggattccgtaaggatgtaaaggctgccatgaaagaaacagtatccggtacacaggtaaccgaatttgcaaatctttctgaaaaggaagtgatcgcaaaggttggtccattgtttaccgctgatcagaagaaaaacggtatccttgcatctgtttctttggctcagttcattctggagagtggatatggcaagagcgaacttgcccagaacgccaataactgctttggtatgaagaaatccctgtctggtaacacatggagtggttctgtatgggatggaaaatccgtgtacacgaaacagacaaaggaacagaatgcggacggttcttatgaaactatcacagcagatttccgtaagtatgcgtgtgtggaagattccattgcagatcacagtgcatatctgcttggtgccatgaatggtagtaaaaaaagatatgagggcattgctggaatgaaaaattacaagaaggtagtgcagcttatcaaagatggcggatatgccacatcccttacttatgtggagaagctgtgttccatcattgagaaatggaatctgacacagtatgacgtaaaagagactgctgcagaaccggagaagtggtacagagtccgtaagagttggacagacgcaaagagccagaagggggcttataaggtacttaaaaatgcaaaggcatgtgcagataagaatgatgggtattctgtttatgattggaatggaaatgtggtgtatacaccatcaaaatcatccgagccggaacagaaaaaggtgtcttaccgtgtacgtgtcagcatcaagaatctgaacattagaaaaggacctgggactcattttgcaaagacgggagcatataccggagttggtgtgtttaccattgtggcagaagctgatggtgagggagcaacgaaatggggtaagctgaaaagcggagctggatggattagtttggattatgcgaagaaaatttaatatgtagtggattgacctgtgggtgctgttgtggtactcgcaggtctttttttatgggatgaatgatagattaaaaggctgtagtgtagtataattcgatttgaaaaatttattaggagtgttgggatgattattagaacggaaacatatagagatttagaagaagacttggctacaatattggatatagatgaattatttctttacgaaagattggctgaaataagcagggaatgtttagatggatttcattctgattgggataagtacgaagagcaaatagatagcttgatttcagaatatgcagatttgaatatggtcgatgaggtatatatttaccatttgggcagacatatggtaaaacctaaggagttgttgccacttaaggaactgtttctttcagagaatagattttcagcctttcttaaggagcataacatcgtatttgacgagcaagatggaaaactcagattcttctatagagggcggcaaattacagcagaagaaattcttgcaagcgggcattttcatttattagctaaacggctgggatatttaggagaagccgacttctgtgttaatggatttgctttttggcctaacattgaaaaaacgtctgatggttatttccatgatttgcagaggggacctgaaataattgaaaacatgggaagatttataggaaaagatctgtggagagaatttaaggaacagtcccaatattatggcatagtcttcaagattccggtggaagaagttattttcgatggaagagatgataccgaaactaaagaagaaaaagtgaggtgtctattaaaatatgcgttgtattatctgaatgatttttacaatggcagcatcggtggaaataatttgatgttacggattcatgatagtaaaaaagttgaagtggatcattgtatattgattgatgagaaaataagttaaaatagtattgtctggattttgcagagaaaatttaatgggaagtgattgacctgtgggagttgaaatgatgcctgcaggtctttttttatttgcatgaaaatgataaaatgaacatgacatatagttgtcgtgtttggtttgatatgatgtaaatatgagaggttcactatgaaaattgataggcttatcggaatactttcagtattgctgcaggatgaaaaaattacagccccagaacttgcggacaaatttgaagtgtcgcggagaaccattaacagagatatagaagatttgtgcaaggcaggaataccgattacaacaacacagggatttggcggcggcatcagtattatggatggctataagatgaataggacactgctgacatcaaaagacatgcagatgattttggcagggctgcgcagtttggatagtgtgagtggaagtcattattatggacagctaatggaaaaaataaaggccggttcgtctgattttgtgagtggcagggattctattttaattgatttgtcatcgtggtataaggatactttggcaccaaagatagagttgattcaaaatgctgtagaagaaagaaatctgctgacctttcaatattatgcaccaaaaggaaacagtaaaagaagaattgaaccatattatctggtatttaaatggtcgtcctggtatgtgtggggatggtgtacagagaaaaaggattttcgattatttaaactgaaccggatggatgcattgttaaaagaatataccacttttataccaagagaagtaccaatgccgaatttgtctgatgaaaaaatatttcccggtggaatcaaggtcaaagcactgtttaccagagattcgcagtggagactggtagaagaatttggcatccattgttttaaagaaaatgaagatggaactttactttttacagcagattatacggaaaaagaaaatctgctcagttggcttctcacttttggggacaaggtgaaagtattggaacccgcatgggtacaggaagagctgattcgtattgcaaaaaatatcataaaagcgtacgatgcggggaattagcgatgaaaatggaggagacgatatgaggtatgtgtggctggatgaatatctgcttggaaaagcaggtgtgacgaaggatttacaaaaagattggaattggattcggtatcaaattggcggaaagatgttcgcagcagtttgcttgggagaaaatgataaaccatattatattacattaaagctggcgccatctgagggagacttcctgcgtcagcagtatgaggatatcatcccaggatattatatgaataaaatgcattggaattcgataaaaccggatggaaacgtgccggatgacttggttaaagatttactggataaatcatatcatttggtgcttagcgggttcagtaaaaagaaacagaaagaaatcttagaaaatctataaatggagaggagatgattaagatggcatttgattataaaaaagaatataaagagttttatatgccgaagaagaaaccggaactggtggaagtgccggagatgaaatttattgcagtacggggaaaaggaaaccctaatgaggaggatggtgcatacaaaaagggcataggcctgttgtatggaatcgcttttaccatcaagatgagtaaaatgggagatcataaaattgatgggtattttgattatgtagtaccgccgctggaaggattctggtggcaggaaggtgttataggcgtggattatagccgaaaagaggatttttgctggatatcactgatcaggctgccagatttcgtaacggaagaggactttcagtgggctgtcaatgaggcgcaaaggaagaaaaaacaggattattcaaaagtagaatttttgacaatctccgaaggcctatgcgtacagtgtatgcacataggagcatatgatgatgaacctgtaacgattgcagttatggatcagtttatccgggaacaaggttacgaaaatgacttttcggagacgagaatgcaccatgaaatttatttgtcagacgcaaggcgtgtcgctccggagaagttaaagaccgtcataagacatccgattaaaaaggcaggaaagtaaaaacaaacagaacaaatttaggcaagaatagtcgggaaaatcattctccgggctgataggatataggtacagcgaagcgaaagaggtgaaataagcatggattgggtggatgcaataagtaaagcaattcagtatatcgaggaacatatcacagaggaactgacggcagacaggatttcagaaaatatcaacatttcttccttttatttccagaaaggatttgctatgctttgcgggtttacgattgtggaatatatcaggaaccgcagacttgcattagctggaaatgatctggctacaggtgaggagaaaattatagatattgcaatgaaatatggatatgattctccagatagttttacaagagcatttacaaggtttcatggtgtgacaccgacagcagccagaaaagaacaggtcatgctgaaatcttttgcaccgctgaaggtaaaactgtcattagaaggaggatatatcatggattacagaattgtaaaaaaagaagcttttaccgtgattgcaaatgcaagagaattttcttatgaaggtgcgaaggatgtagtgccgcagttttggcaagaacattatcaggcgggaaaaggaaaaactgttatgggggtatatggtatcaatattgacctgaacatggggcatggtacttttgagtatctgattgcagatccgtataatccggtcaaggaagttccggaaggatttatagtgaagatgattccggaatttacatgggcggtatttccttgcaaaggtgctatgccatatgcattgcaggatgtgaacacaaagatttttacagaatggcttccagcacttaaagaatatgaatttgctgctgggtattgcgtagaatattatgatgatccatctaaatatccaaagggaacacaggacgaaaattattattgtgaaatctggattcctgtgaagaaaaagtaaatagcgtaagcaaaaggaacctgcaaggctctctaagatatagggactttgtaggttttttatatttttgcaaaagaggttaaaaatccgctcatttcttttgcctgtgacatagagggagacagctccttactttatgttggaggtactgactatggttccggaagaagttgtagaaaaatatgatagagaaatggacaggagaacgaggcagaatctggagcgttttgcggagtttatggccagaatgattgaaaagtatggtcataaggttctggcagaaatggaaagagaagaagcagaaaaacagcagaatggacagtaagaaaatgcgtcgattatttttttgtaatcggcgcattttgcccgctgacgcaatggaaaaagtgcgttatattgtagatccaaggatggatgacgaacattccttgggcaaccgaaaaggcggtgatagattgaaaaagaaaaaatgctatatttacacaagggtttctactatggctcagacagaaggatacagtctggatgcacagcaggagaaactaaggaaatatgcagaatataagaaccttgaaatagtcggagaatattgtgatgccggtaaatctggtaagagcatcaaagggcgtccggcattccaacagatgatggaggatgtggcaagccaaaaggatgatgtttcttatgtgttggtatttaaactttcacgctttggaagaaatgcggcggatgttttgaaatccttacagcttcttatggattatgaagtggatttagtttctgtggatgatgccatagacagttccacacagggtggaaggcttacactggccattctctctgcggtggcagaaatcgagcgtgagaacattactgttcagtttctgtctggaaagatgcagaagttgaaagaaggtggatggccgggaggtcccattccatatggataccgcaaagagaatgatggtctcgtgcagtatccacaggaggcagagattgtaaaactgatttttgacatgtatttgcaagatgatgtgctggcaactaccattgttcggtatttgaatgacaatggatataccagagttattaaaggaaaggtcagtccattcaagtatgattttgtgacaacgattctggataatccggtatattgcggaaagattttttatggcaggcgtacaaatagcaaagaatccacgaagcagaaacgagagattctggagatacaagggaatcacgaagcgattatatctgtggagcaatgggagcaggtacaacagaagcggaaagccaattctatgagctgtaaaaagatagatgagccggacagagtaagtctgctatcgggaattgcgaagtgcccagcgtgtggttctggtatgcttgcatccaagaataaacgcatcaataagaatcacggcggccattataaaatacttcattattatagttgtgggaatgcaagaaagcagaatggtatgacctgcaaaattcgtcacacctataatcaggagaaagtggatagtgctgttttagaaatgataggtaagttgtttacggttccgtctttccaaaaggaaactgccaaatggtttcaggataaggattccatagaggaacttacggggcagttaaaaatggttcgtaagcagttatatcatcaggaacagcagaaacgtagacttggagagattctggataatttggatattttggccgatgattatgatgaaacttatgataagacgcaggcggaaattgatggtgtatatgatgaaatggaaagactggagactttgctttcgcagacgaagaagaaattggattcggctgagcaaggaacaaaagccttaaagcaggtggaaaatctgattcagaatataccggcatttttcaaggaaatgacctgtgaagaaaagcggaacttctatcatttgttgattgagaaaattgagatgtacccggaagaaacgccggatggcaggattgtaaagagtatttcatttaagattccggtgttttatgaggactgggagccgacaacagaattgatagcggatgaagtgataacatacacgcttgatacctcagaagttggcataacatctgcggaagcaaaagcaacctatgtagaattgaagaaatacattttggacagatatagtacaaaagtttcttctttatacattgctcagataaaaagaaagtatgggattgatatgggagagaattacaataagccagatgatccaaacaaaagagttccgaaatgtccaaaggcaaaagaggaaatgatcatagaggcattgaagcatttcaagatgctggagcctgatgtgaaaatgatagcgtaggaggtgcggttcatgaagaagaggacgaaatgttatatatacattcgtgtgtccacagcaatgcaagtggacggatacagtcttgaagcccagaaggacagactgacgaagtttgcagagtttcaggatatggaagtggtaagagaatattgtgatgcaggaaagtctggaaagagcattaccggacgtccggagtttacgcagatgcttcaggatgtagcagatgacaaagatggtgtggaatacattctggtgttcaagttatcccgatttggacgtaatgcagcagatgttctcaattccctacagtacatacaagattttggtgtgaaccttatctgtgtggaagacggaattgattcatcaaaggattccggtaaacttaccatcacggtattgtctgcggttgcagaaattgagcgtgagaacattctggtgcagaccatggaaggacgaaagcagaaagccagagaggggaaatggaacggtggtcaggcaccttttggatatacactggattctaaaaaaggaatgctgcttgtaaatccggaagaggcagaggttgtaaaaatcatctacaataaatttgtaaatgggggtgtaggtgcagatactatcagtaattatctgaaccagcatggatatgtaaaaaagaaaaatagaagtcatgaattgaattattttacccgtagactgatacgaaagattttagataatccggtgtatattggtaagattgcatacggaaagagcagtaccgaaaagattaaaggtaccagagaccagtatcacagagtaaggaatgatgattttcttctggcagagggattgcatgaagctatcattgatttagacctttgggaaggtgctcgtgcaaaaagagaagagaccggtgttaaatgggttaaaactcacagtctggagcatgagcatattttgacaggtttgctgaaatgtccggtttgcggtgttggaatgtccggtacggtacgaagacgaaagaacaaaagtaccggcgaatataaggatgacttctattatagatgtaaacatcgcaaaaaaatcaatgagagtgatttctgtaattgcagtctggttttaaatcagaatgaattgaatggtgaggtagaaaagcacattatggatcttgtgaaccatgatgattgcagagccttcatcataaggagaatggaaacaaaggtggatatcagctcattggaattagagcgagagcagctacgaggacagttacgtcagttgtctggcgcaaagaagaaactgacagatatgcttgaccgtttggatgtttcggataagcattatgacagaaaatatcaggacatgcacgatagacttgataatctgtatgataagattggcgatatagatgaccagcttcaagatgtgaatgagaaaatccgcatggcctatgaaaatcaaattacttcaaaacaggtctatcaaattctcacatgttttgataaaatatattttgagatgacggacttggagaagaaagagttcttcaggaacttcattgatgaaatcgaattatactctgaacgacagagtgatgggcgcatagtaaaacagataaacttcaattttccagtgtattataatggaaacgaaggtaatgcaattcggttgcccgacgaaaatacagtcgagacgatggtgttgctacagagacgagatatatagaaatccttgaatttacgcattttgtgaggtttttcaacttccataccttggatataaatagtaaagaaaaaaggttggtggacagaatcacagttgttgtggcactggatatcgttacgaaggatacaaagtaaatctgttataaaagtaaatagtggactatcaaaaattgatagattatagggatactgattttgcaagaaaaggtatccctattttttatatagggcattccaataggagtgtcttttttcataaaaaagtttcaaggaggaaaaatatggaaaattttacagcgttaggagcaaatgagattacaaaaaacataacttttcaaggagagatgcataagaaattttttctgctttatttaccggaatgtagaaacgaagatgtgtatcatcaggcattgatctattgtcttggaatcagtcgagatacacgagaacatgtggaagaaatttatgattttgaaacaggatgcgtcaaaacagaatgcatgagtgccggatggcagacaagtgggagtctgaaaatcattcggatggcatttaatctttactgcaatggcacaccgactgtatatgaaaaggaaggtgtagaaggtaaattaaaagagtgtgagcattatacggtagaggatctgttttgttgtgagtatgcgccatatttctggcaggcgattcaacttcgttatccagagtattgcggaatgtgaggtgaaacatgttaaaaatcagattacagggaactaccaatgatattaagtggttcaaaaaaatattggagagagacaaaaggattgctcttttggaaatttcacaaccatttccgaataagggaacgaaaaaatattttcgtgtgtatgcagaggtagaaagaggaacgaaataagcggagggaaagttatgtgtaaagtaatcgcagtagcaagccaaaaaggcggagtcggaaagaaaacaacctgcatcaatcttggtgcagcattagcaaaagcaggaaacaaagtgttgcttgtggataatgatccacaagggcacttgaccataggattgggattttccaaaaagcagagagtgacactgaaaacagttctggaaaatcagatagaggaactggaacatccattaaaaggtgcgattctgaactatggtgaaaatctggacatcataccggccaataaaacgttaggaatgatggggatttatctgtcaacggtagaagaaggggaactggtacttggtcaggcattagaagaagtcaaaggaaaatatacgtatattttaattgactgtggtccgtcactgggggcattgtcaatcaatgcattggtagctagtgacagtgttttgattccagtggaattggataagtttgctacagatggattggaagagttgttgcggaccgtgcgcgtggtaaagaagaagtataatccgcagttggagatagaaggaatcctttacaataaagtagaaagtcggttgaacaataccaaaatttaccaaaaagcaatcgagacagcatacggggagcatgtgtatatttttaaatcttatgttcctaaaacagtacggattaaagaagctccgaattttggcctcagtgttttggaatatgaaccaaaaagcgaaagtgtccggcagtacctgtccctgatggaggaggtggcaagtcatgaataaaagaaaagcagtcatttctcttgccgggtatgaggacatttttgaggattctatggaaaacggggaaagggaagaagttgtcagactccccatcagtcagtttcatatgtttcggaaccatccttttcgtgtggtggacgatgaaaaaatggaggaaacggtaaagagtgttaagcaatatggtattctgatcccgggaattgttcgtccgcttaatacgggaggatatgaagtgatcgcagggcatcgtagatggagggcctgtgaattggcaggattgaaagaaatgccagtgcttgtccggaacatgacagatgaagaagctacggtgattatggttgatactaacatccaaagagaagatattttgccaagtgagaaagcaaaggcatataagatgaaatatgaagccatgaagcatcagggaagcaaaggggaaaagtttacggcggatttggtaggagaagctgctggtgaaagtggaagaactgtgcagagatatatccggttgacagaattgattgcagaactcttagatgctgtggatcacaaagtgatttctatgaaagttggagaaaaactatcctatttatccgtggaagaacaaggctgggtatgggattgtgtgaaaacgtcatctgtacagattcaggacagacaagcagaatgtttgaaagcgcagagcaaacagggattgctgtatccggccatggttcaggatatcctgatgaagaaaacaaggagccggggacaggtgacgattccagaaaaaaggattgcagattattttccggcaacttacaacaaacagcagatcgaggaagtgatttatctgttattggaacagtggaaaaaacgacaggaaggtgagaaggatggagagcacaataaaatttgactattttagggggatggaagcggaacagtatacgttctatcggattccgaaggtcttgtttaccgcagaatgtttccgctcactttcctgtgaagcaaaagttttgtacggtcttttattagaccgtatgggactgagtattaagaaccggtggtttgatgaagaggacagggtttatattatctttaccgtagaggaacttgcagaattattaaactgtggaactcagaaggttgtgcgtcttttaaaagaactggatgtaaaaagtggaattggactgattgagaagaagcgtctggggttgggaaaaccaaatgtgatctatgtgaaaaactttatgattcaggaattgacaagggcagaaaaacaggatttagaggcggaaacccttgaaaatacactgaatggtgaaaatcacaattcaagaaatgtgaaaatcacaattcaagaaagtgcaaaatcacaattcaagaatgatgaaaatcacaattcaggaaatgtgaaaatcacaattcaagaaagtgcaaaatcacaattcaagaatagtgaaaatcatcattcaagaatagtgaaatcggacattccagaatatccaaaatcacaatctaataatactgagtatagtgatattgaacataatgagaatcaatcttgtctacgcacctactatggggcgtttactgttctttagcttttttcaataaaagctagaattcgttctaatgtatcatttcccccaatccatatatctggttcgaatcccctaccttcttcaatatcgtttatcgatattgtatctccataagtagctgttagttttgaatagggtaacgtacagcgtatgctttgttttgaaagtgtacaaccagatgtatttgttccaacaaaaacaacattttttaaggtatctaatgattcaacaaaccactcagcagaagaagctacatttttatcaattagaacaaatattttagtagtgtttggcagtactacttttttttctttggtgatataccatttatttttagtctgggttgcaatgtcagattcaatttcatataagtttttaaaatatggagttaaattttcgtaatcaattatcttaagagcttttttagttacataattatttattaaattggctaaacgaatatctatatgatttgttttaggcatttggccagtaaaactttcaaaccatgttgctggaatagtggtttgtccgcccgaatttcctcttaaatctaaaatgatcaaatctttaccttttgcatatttagcagattcctgataagctgtaagattatttgtgctaataaaggatcgcattgaaaaaataggaatattattaatttttttactactatatgctttggaaagttgtatttcattgtatattttcccggtacttttttctaatttaacatggatttctttagagtctcttccagaattaagtttcagggtaaccgctgtgtaaggatgcgtagacaatattcctatataattacagcgcgagcctgattcatctaaagatggtttaatatattgttctacattgggatcaccttcgatagattctatataccatttttgggtgtttacatatagataaaatcctctggaatcttgttgaatcgtaaatgtttgattataataatagtcctcatggtttaacacaggtgtgttatttattaaaaaatggttatctttaataaaatataaattttttattagtatttgttgcaatgtaaaaactgatagtttttcaggatatgcattgatttgatttaaaatattgttttttgcagtttcccatttctcttcatttccaaaatataaatatccggcataagaatactttagtacttcaaaaagcaaggtgacgtcagaaattgcttcttttatttcaatagttttttcttgtaaattataagagtctgattccaaaagtgcaggttctaggcagtttaactggttttctggaattcctagatcagagggagaatatttcatcagatattgacgatagtcttcactattagttggtgatacttctattctttttatattagcattgataaatagtgtgttaagctctgaaacattgctgaatctatataaaataaataaaaaaagaaatgttaaaagtgttgaaaagagtttttgtttgttgaatttcactatttttccctccatatatttactaaagacatacaatatgttaaaatatagacaaaagttactaataatataacacaataacaggagaatataaatgaaagaatctaaatttaatgtattttatgaagcgaaatctaattctcaaaaaattttggcatataattctaggtcaaatgctttgaaatgtaagaacccgtattattcagaatgctattatacgaggagagagtaacatgaagaataattacatacgcttactaattagccggtggttgtgtacatttggaactatccttcaaagtgttgcattgccaattgtagttttttcattgacgcattcatcagaattactctctcttacatttatatttgaaactattccttggatgtttgttactccatttattatatcattcataattgataaaatttctgttaagcgtttatatattagttgcaatattttgcgcgctatttttacatttttattggcatttgctattcgtagtagtataatgacagttatgattttttttgttatgggtacgttaaattcacttattgcatcattgtactctacgcttataaaaaatacttcacaggacgaagatgtgtgtagcatattagggctatctatgggtattgatgatgtgattagtattttagcgcctgttttggtcacatttgttgtaagtaagaatataactgggattttgtttatatattgtaatgcggtactgttgtttctagccgcattgttttcgctttcaatacaatatacgcccaataattctagggtcattgaagtaaagccggaaaagagaaatatatttggagatacttttcataatttccaaacattgttggattctaaaaatacatttttagtagtttcggaaagtttacgttcattagtagaagggatgtgcatcccattattgatatcatatgtagttaccatagtaaatgcggaagaggaattatatacaattggacaagtattgggagccactgctcaagttataatgtcagttatttatatttatttatcaaaaaaatataagcctaatcgaattataaatttgggtgcattactgatgatgtttgcctttttgatgttagtatttaatgggaaatcatttttatatttagtatcaatgattatattaggggctggaatggcaatacgacaattgataggagaaagtgtttttatttccatgtatgatgaagatactatttccagaaaactttcagcatttaattcaataattgctttattttatttgttgggatatatactatcttacgtttttccatttatagtttcattaaaagtaataatgggtatgggggcaattttgattattcttcctacctttttgatgaaatctaaaagaggatcatttgtaaagtaagcgcctagttttggggtatcccccaaatatatatttccaaaatcctgctaccggagggaaagtgatattatcctggaacatttgaaaggacagccttgtaaatatcaggaaattggattagatggcggatatgatataggagcagtacacagagggctggagttattaggggttcaaggttatacagctatccgtgaatatcagaacaatgcaatgaaaaagggattctgttatgaggaagaaacagatcgctttgtatgtagacagggaaaacatttagcatttcagaaattaatttataaaaagtcaacacagaactattaccgtttatatagccgttcaaagaaacataggaccaacaatgtaaaaactgtccggattttgcatcttgtgctacagatctcggtacagtcaggatcaatgcaagtgcttattatcccttttatcgaaacagcaagaaagtagggaccagtgattatttgagggtcatgcgtcttaggaagatatgggcagaaggaacattcgcagttttaaagagagaacataaattgaataaaatccaaaaaagaggccttcagaaagcgacagaagaatgcctcttatcggcaacggcattaaatctaaaacgactggtaaaagcggtttgaataactgtaagcgcaaaataattcgacggattgtgttgccctaaaaatcattccataataatcattagaaaatgcaagcatttcactttatcttctcttgccagaaatgatagatgcgagcattttactctatccgatttatggaggtgtgctcatgagaagcaaaagaatacctgccgaagaacaataccgtctcatcatggaatgccgtcaaagtggattgacagatcatcaatggtgtgtggaacacgacatcaaaccgggaactttttacaactgggtaaaaaggctgcgtcagaaaggttgtgtggatttgccagcgtcaaccggacgcatctatcgtgcaccggaaaaccaggaagttgtcagagtggattttcatgatactgacccgctccaatatgaacagccattaaatgtgattccggtagctacggaaagaaataacctttccgtagcagagccaatgaagctgtctgtaggaagctttcatctaacaataccaaatggaacagatcctcagcttctggctcaaacgcttcgcattgtgaaggagttggaatgttaggggatatcacagccgccgatgaaatctatatcgtaacaggcagaacggatatgcggaaatccattgacgggctgtgtgctattgtagaggatcaactccatatggatccaaggcgaagtgccctgtatcttttctgtggaaaacgttgtgacaggatcaaagctttgctctgggaatctgacggatttgtgctgctgtataaacgtatggaagtccagggaagattccgctggcccagaaatcagttggaagtaaaacaattgacctggcagcaattcgactggctcatgtccgggcttgaaatcgaacaaccaaaggcattcaaacctacggaatgatcgcgtaaaacatctatgccaaccaacagaaacggagggggttctcaccctatatcatgtctgaaatcccttgtaaatgctgggttttctgcttctttttcattgctttttatggtataataagagcagtgaaaaaggagcagaaaacatatggctggtaattcaaaagattcaaaaatcctcgcgtacaaggacatgatcaaccaactgaataagacgatttccacacagacagaactgattcagtctttacaaaaaacattggaagcagaccgtctggaaaaagaaaaccttcgtcagcagattgaatatctcacgaagaagctttttggtacttccagtgaaaaacggaaagatatcgatggtcagctgaatctttttgatgaagccgagcaggaagcagatccgacatggaaacaggaacttcctgatgacatcactgttccggaacataagcgaaaagcacgacggacacatgcagatctctttaaaaatgttccttcctgcgacgagatcatttctcttccggaggaggagcgaaactgtccaacctgcggaacgcagatggaatgtattgggaaagaattcgtccgccatgaatttcgctttacccctgccaaaggaaaagtagtaaatatctatcgtgaaacctataaatgcccggaatgtgccatatcagaggaacacccagatgatcagacatttgtcaaagcgcctgtccaggaaccattgatcccagaaagttatgcatcggaatccgttgtaggatgggcaatgcaccagaagtaccagaatggtctgccattaaaccggcaggaatcggaatggaagcagctgggtgtcccattaagccgggctacgcttgctaactggatcatttactgtgccgagaattacctctgtcatgtttatgattattttcaccgtcagttacggatgcgtaaatatctgatggcagatgaaacccgggttcaggtactgaatgagccggagcgcaatcctgaaacagattcctggatgtggctcttccgcagtggagaagatgggcttccgccgatcctgctctatcattacacagagacaagggcaaagttccatgcggcatctttcctacaggggttcagcggatatctggagactgatggataccagggttataacaatctgccggatatcaaacgatgctcttgctgggcacatgtgagacgttacttcacagatgccataccgaaagggaaagagtatgattacagccttccggcagtgcagggagtacagttctgctccaagctgtttgattgtgagcggtactcaaaagcaaaaaatcatactgcggagcagagaaaacagttccgtcttgaaaaggagaagccgatactggaggcattctggaattggctggatcaacagcgtccaaacaagggaacccgtttggcgaaagcggtgaactatgcccaaaatcggaaagacaccctgatgacctatctggaagacggtcattgcagtttatccaataatcttagcgagaatgcaatcagaccattcactgttggccggaaaaactggctgttcagtgccagcccgaagggagctgcctctagcgctattgtgtatacaatggttgagatggcaaaagcgaatgacctgaatacctacaaatatctgacatatctcttatcacagcggccagacgctaaaatgtcagatgaacagttggaacagcttgccccatggagcgagactgcgaaagcgaactgtcaaaactaaacatagagcaaaacgcttgcatctatcattttggtgcaagcgtgattcatgggcagcgtagcaatattttgcgcttacgttaaaagtaatatcgcagagagtgggcgttcaaatattatactataaatgagcaaatttgaaaaattgcacaaaactacactgcgaatttcataaatgaatcaaaatcattgctttcctttgcgcattgaaaaagataacgatacttttccagctgaatggtatcacagatttcgtgatatccagtttcaaacgaacagaacctaccagtacccactgcacacatgaaatgtgccagtgacataagcagccagtaccttttgattccctgtgcagagcgtatctgatagctgtccagtgccagtttatccttacactggcggaaaaatacttcaatcggccatcgacacacataccaggaaagaatctcctgtgtagatagggctgcgtttgtactgatgaaagcacgcaatgctttgggattaccaaatgctttttccggataactcaaaagaactaccgcattttctatgccgttgaggtttccctcgtaccggtacacataatagtttcgttttttgactgtcacaaggtcaaattcacgatgtgtaacagacaattcggcggccagttcacgaagtttctttttcattcccgatggatacagcaaacggtttgttttcaaagcaccgatggtatggaaacctctctgtgcaaaggtattgattatcttttcagaaacataccagcagtcgcaaagaaaataggacattaccggtggaacaggcagctcctttgcaatgctttgtacaatgtcaatcttggaaattgacttattgtacattacaaaagcatagttcagaacaatgccattgcaggaaagcataacagcaactgcctgatgcccgtagtcctgttttccctttaaatgggattggtgaaaatacgcatcttcaatcggatgtaaagcccgtgacgaaggctttgtctttgaagcaatcgtatcgtccacaatgcagaaaacaggctttccggtgcgtgctgcttctgaataaataatctcaatgacagagcattttaacgtatctgaaagtaatgaatcatcccattttccggaattgagaaaatgggcaatcgtcgttctgtggcaggaactgtttttagcaaagtccgtagtttttccatgatatcctaaaatgaaaatactgattaggatactcataagatggtttattactcggttcgaataaaatttgcataagtttaattttttaaactggttgtatatgaatgaggaatgatgtatagtatttgcgagagacaccttctttcgtaaatgttgcaaatgtttgttttggcactttcattatacaacacatggaatcgaggtgtctttcttttatgcaaaatcacgaacttgctcatttatagtattatatttattaatactttcctgtgttggatatgttttgtttttctggcaaaaaccgggcagtgtaaacgaaggcatttcgggtattcagatatttcttttatatttcattgcaatgtttggaactatctggctttggagtatatgctctgtgattttgtgtacattgcttcgaaatatgtgggcaggtattggatgtttatttggaattgtcattggacttatatcaaaagcgggaagttcatttttcggaaatctgggattgttttctttcagcttttgtgaacctactcaattaatgtccgagagttggatttatggaacgcttgtgtcttttatagcggggctgtttttatttgcagtattaccaatgactttaaagaaaagaggatagattatgagtattagaataaatgatttaacagttagatttaaaaatggtgtagttgcagtaaataaggcatctcttgaaatacctaagggaatttacggacttttgggtgagaatggtgccggaaaaaccactttgatgagggttcttacaactgttttaaaacaaacggaaggaatggtttcccttgatggaattctgtataacgagggaaattatgagaaaatacagaaaaagattggttatcttccacaggaaatcgacttatatccgaatcttacggtgaaagaattaatcacaaatgctttgatgcatgcatggaatctactggcaaatattggattccaattttcaacatcttagaagatgaaatcaatatctacttaactcatccaaaatatgtcaaagcaattaaagggaagaaaactgacaagaaagattcaaaatggatctgtgatttatttaaacatgatctaatcaaattttctttcataccgcccaaagaaataagagctttgcctgcatgttgaatttttcctcaatataaaagacgcaatacacattaaactgtaccgcgtctaagcgaatgtattatttgtctaattgtataaaaatccagaagaagcattcagaaacaactaatcttttcatgatacataatatgtatttagttgtacctatttctctatagtaagatcatagtattttagaactccactcaagtactcgccttttaattcacaagacaattcctccatagaatcatatattcttgttgtaaatactacttctcctctattcacaaaaatttctaaacttgaggaatctgagaagattctgatatcctcaattgttttaatagcaattcctctatgctttcgtccagaaccacagctagttatatccagtgttaaaattccttcttcatatcttaactctgcactttctcgtagctttaatacaaaatctctgctgacttcaaaatctacatgaatctcaaaccagatagaagttgaaacactcaactcgttgttgaattccatctttttttcattagtacgtagcttttttaattcttctaatggtttctgtgctaatttaccttcttctgttacatatagttctctcggtaatgataatgcatgctgccatccattctttactgttttgtcattattataatcactctctggcattcccatccagccaatcaagatatttctacctttatgatctttaaaaacctgaggtgcataaaaatcaaatcctctatctaattgacaaaattctcctaactgatatgtcttatcttcaaatttatagttcagtggaaaataaccacattgatgagcattagcataatcaagaccattttgttttatgccctgtggacatacaatcaagaactgttttccatcaatctctacatagttcggacattcccacatatacccaaacacatcctgtgtagtaaatctcaattcatatttccaatgatataaatcattactcttaaaaagtactacagaacctttatcagacaaatctctggctcctagaatcatgtaataatgatttcctctttttataatttgaggatctcttacatgtttactcatatcttctggaaaatcactatttgtcataattaattgcttttttgaaaaattatatccgtcctttgtaattgtcagaataacattttgttctcttccatcagtaatatagttatattcttccccttcatactttacatttccagtataaaagaaatagtactcgccattttcttcataagcggacccactatatgcaccattcgcatcccaggatgaatccggaaaaatggaaggttcatgttcttcataatggataaaatcctcagttaccatatgtccccataatcctgttcctccatttggattaaaaggagtgtactggaaatagatatggtattgacttccaatctgacatagaccattcggatcattcaaccaccctaaaggaggctgtaaatgaaatttcattcggtatggatcagaagcaactttatttctcaaattatcaaatttcttacatttatcaaagtactgtttttttgtcatcggcttcttttctgcctgcataatgcctcctaaagttcttctcctagtgaaacagaacgtctttttgtatttttaatatcaaacttcttttccgggtttgtaaatacaagaggaatgacagtatcatatccttcatttttcactttatccatttcaaacgtaatcaatgtatctccagcttttacatagtccccttcctttacataggatttaaagtattttccatttaaattcacagtatcaatacctatatgaatcagcatttctgttccatctacggcttttaatcctattgcatgtttagtaaagaaaattgtttctacctttgcatcacatggagcacatactttaccttctgttggaataatagcaaaaccttctcccattattttttttgaaaaagtaggatcctttacatcttctatagaaatgagttctcctgtagcatatgcctttataccactctctattttgttttcgttgtttgtttcttctttgctttctacagttgttgaattaacttctgtatttttcttagttacaacttttcctatgaatagtgtaataagcattcctcctacaagagcaatcagatgtgcaatcaaataattaatatatccgttgttttctggtgcgacaatcgcaaacccaggaagtactgttgttccatatcctaaagcagtgagtccactaaaatatacaaatacacttgccacagctgaagcaaggcagcctgcaacaaatggatacttattacgaagattcacaccaaagatagccggttcagaaattccaaatagagtagatgtaaatgctggaatacataattctctactttttacgtctttccattttggaatcaaataccctaaaacggcaccaccttgtgcacatacagcaacagaagcaataggattaataaaatctcttccagtatcaacaagcagctgtccttcaatagctccaaatagatgatgtagaccagttattacaataatctgctgtacaccaccaaaaatggcatatccaacaaatcctagattctgtgtcatccatactaaacctgtagtgagtccgctagcaagtagacgtcctactggccctacaactgtaaatagtaagaaagctgatacaaatactgtaaacattggtgataataatagttttactgcattaggaacttttctttcaaagaatttatccaatttagctactacaaatcccatcatcaaggcgattatgatacctccttgaaatcctactaactgaattttcaaccctaagagactgattgtttccacttttactgctccctgagctgcctgataagcatctgctagattgttgcttaacatcaaagcaccaataactagtccaagaatggctcttccaccatatctttttgtagatgaccataccacaatcaatggcaggattgagaatacacttgatgaaacaatactaatgaatcggtttaaccctgctagcataggaaccatttcaacgatagatttttttccaaaaagtccctgctgtccaagtaaaccagacaatcccatcaataatgctgctgctagaattgctggcataatttcaataaacacatcagagagtgattttataaccctctggataggattttgtttctgagttgcctgactttttacatcctgtaatgtcatgttctctttatgtgtgtatttagcaaacacttcataaacctcatttactaatcctgctccaaaaataatctgaatctgatctccagtcacaaaagccccttttacaagcgcaactgtttcgatttttttcatatctactttagcctgatcttcaaccacgattcttagtcttgttgcacaatgcgcaactccaagtatgttgttttctcctccaacataatctgcaatctcttttgaaatttgaagatatttctcttcttttgtcgctgtcatttttttacctcttctttatacatctaaaaactgctgtctcgtactctcttagtttcatgtaagactctggtatttctgtatcagagtaatttgccaatagcttttctgtgatttcataattgtcattccattgttttggcatcttaaactctgttttttctccaaagaagttcgcaataaccaacaaagcttctttttctccctctctaagataacaccagactgaaggatcattttcttctaaacgaacatacttcccttctcttactagttcttcagtttttctcatttcaagtagctttttatagtaatgaaatactccatcttctctttttaaatcattttccgcattgattaaagaagcacttcttcccatctttatccaaggcgttccactagaaaaaccatttccttctgaagcattccactgcataggtgatctaccattatctctagattgtctgcaaatgccttgcataatagtactttcttcaattccgcgttcttttctttccttatatacatttaaagactcgatatcctcaaactcctcaattgtttcataaccaggattaggcattccgaattcttcaccttgataaatataaggtgttcctttcaacatatgtagcacagttgctagcattttagctgactcaactctgtattttccattatcgccaaatctgcttactacccttggctgatcatggttagaccagaataaagaattccatccgccagtttcttccatcttatattgccattttgaaaggatatcttttagtttaagaaaatctgtatcctgcacactccagcgatcaccatttttataatctacttgcatatgctccattgcaaaaatcatatcgagttccttctcctgcggacttgtcaataatacagcatcctctacagaagcatccatagtctcgccaacagttaaaacatcaaatggcgtaaatattttcgtatttatttcctttagaaattcatgaagtcttggaccatttatgtaatactttttacctggtatatcattaagagtatcatcatcaggaaatgcctgatctttagaaattaaattaattacatcaagtctaaaaccgtctacacctagttctacccagtatttcatcatatcagatagttcatctctcaatgcttcgcattcccagtttaaatctgcctgctctttcgcaaacaaatgtagataataattatcttcaccctcgattttttcccaggcacttccaccaaaaaaagatttccagttattaggttcttttccattcacccctggttttactatgtaataatccctatatttgttatctttttcaatgaaagcctttttaaaccacatatgatctgtagaagtatgattaagcacaagatccataattatacgaatatcccttttatgtgctccttcaactaattctaaaaaatcattttttgatccaaataacttatcaatttcatagtaatcactaatgtcatatccgttatctacctgtggtgaacaatacattggcgtaagccaaactgctccgacaccaagattttgtaaatagtccaatttactgattattcctcggatatcgccaattccatctccatcagaatcacagaagcttttgggataaatttgataaactgtcctcttcttccattcttcattcatttaaagcccctcctattacgtatttatttacttacatgcctagattataagtatgttttttccttttgtcaatggttatcatgtaaatattcacgtaacgtcacaaaaaaagaatacctcttaaaggtattcttcatatcattgatcaagttatttacttattataagcttctacgctttttctttcaatcaattcaaacggcattacaacactactttgtttttcatgtgtttctatatattttatcagaatcttcattccttcgattcccatttcatataatggctgtgcaattgtagtaagaggaggataactcatttcagccactttagtattatcataaccaatcactgacaattcatttggaacagacatacctcgttcatatgctgctgagattgctcctatagccatgtcgtcacttgctgcaaaaacagccgtaatttctttatctaaatcaagtagttttttcatacaagtcttaccactttggaagctaaaatctccataggcaattctgctttctttaacagtcaatccagcatcctccattgcctttctatatcccatctcacggttactcattccttttttacttgtacctgcaatcatagcgatttgtgtatgtccctgcgctagtaaataaccaaccgcagcatatactgcctgaaaactatctactttaatatatggaacctgatacttatatgatgtacttgatataaggatgtaaggaatctttgttctttctagtttttcatacaagatttcatccaaaaatgttcctactaatgcaattcctgatactttgcgcttttttaaaacattaatatcttcatacgtgttttttccttcttttcctgtattactgattaatatactatagccttgtttacgtgcaacttcttcaagaccagaaataatttttgcgtaaaaatcagtttcaagatcaggaactaaaactcctatcaatttatctactttagggtggttataatccttcagagctgaggcatttcctttataaccagtctcctctataaccgctaaaactttttcttttgtatcatcgttatatccacccagaccgtttataattctagacacagtagctgtcgatactccagcacgtctggcaatttccctaatagtaattttcatacggaatcctccacgtaattatttacctaaacagaatatcaaatccgattgtttttgtcaatctagtcacattttctcaaccatatccttttcctatacaattattcttacatggttcatattacttaaccagctattctagttgtgataaaatagtatttgaaagtccagctaataaatgtcaataattaaatgagaaaaaatttattttgtttattgactaaaaaagggcagactttccccttggtgaaaatatcgttttttgaaagatattgattctttggatttgcagtattttatgcagccatgtcgcatttggcagcattgtattgtttgatatgttcctgaggagcaatgctgtggctgtagaaaaaaatctggaagatgcatttctattttattttggagaaaaatcggaggaaaaacaagatgcttaaattagaattaaaacgaattttttcaaagaaaattaatgtattttcaatcggattggcattgatacttgctgtcatttttagcggatttgcagttacaagtaatcgctatgtggatgagaatggaaatgctagtactggaattatggcaacaagaaaacttacagataacagacgagcatggaaagggacattgacagaagatgaacttggaaaagttatagaacaaaataaaaatgcgatgacacaatcctcagaagaaaatgcgatttacggaacgacattacaaccgatagatgatattaggggttttataatatcggtattaacaccggatgcagaatatgatgaaagtgttctgaatcaaatgacaaaagaaaatatacaagagttctatgacacttatcataaaaatatggaaaagatggcagaagaatatggaaagacttctgtacagaaaaaatacttggaaaagaaatataatgaaataaaattaccagtagaatacgaatcttatagttcatgggatactatgattatgtatgtagaaacgtattctattattctggcaatcatagttggttttatttgtgctggaatatttgcagatgattttcagacaaaagcagatgcagtatttttctctacaaagtatggacgtacaaaagctgttaaaacaaaaatactggcaggaatagctacgacggttatgatttattgtatgggaattatattacttagtgtgatttgttttggaattatgggaaccagtggtatgaatacaccttatcaaatgtatcaggcatatagtatttacattatgtcatatggacaatactatttgttgacagttgtatgtggatttatagccagtatgctggcggctgtagtgtctatgttagtagcggctaaaatgcatacaattagtgtcgctgtttgtattccgttctttttatattgcttattgccatttataggacgggcactttctgggtatacaacgcttttcaatttgataccaacaattttgacaaatgtacaggcaagtgtaaaagtcccacttatttatcagattgggaattgtgtatttcgacaaattccgcttgtaatggtaatgtatacagtgatggcaatagccttactgccttttatttataagagttttcgcagatacggaaataagtaaaaattgtattcatactcatgaaaaacaaagtaagtaaaatattttctggaaaaatcaaagcataatttaaagacttaaggcgggcaagttgcccgccttaaattgcacgtattatgttaaaagaccggatagagtttttccaatgcaaaatccaatctgtggatataactcctgaatttcctgatattttgcttcaatcatttctggttcatcagcccagatcttttcatatattttgaaagctcttttaaaatgtgttttggcttgcggaagattggcagtcatcagataaatggttccaaggttttcctgtactttggcataatccagacagtcatcggaatggtattccttgatgatgccggataatttttgtaattcggagattcctctttcgggttcctgctgttctgtcaggaacattgcataattggcaatctgaggtatgctgtcatttatatgaagcaggttaaattggtcaagcagtgagatacttttttccatgtgttctcttgcaagatcgggatgaccgttcatgcggtaaagtccaccgagattggcatgaaggttggaaacaagtcgagcattgtcagcagtgatagtttctatctgggcaagtgcatccttttccagttttattgctttttcaggtttggtttcaagagttgcctgaaaatccagtaataatgcccggtcggagtcggtgccaatgttttttgtctttaacagccccgtcagttcctgaatgattccattcatacctttgtggtagttatagttatccatgtatggaaatgcattttccagaaaaagcagatactttggtatatcatccttttcaatcaattctatgatatttccgattgtttgaaatagctttttgtaataatctacttccattccatgcattaaacatattttctgtaaagaatccagtaatatgtggcagcgagttacagatggttttgtctctgaaagggtgatttcctgaatcatcggatgcagagagatagtgcgacgtgttgttgtctgaacgaaaccagtctcaattaaatcgttgatctcatttagtgtgggcagttccagccatttggcaaacatacgggcagaaataccggtggaaggaagaaagcacatattacacatgatatcctgctgttcaagagataaagtgtataaagaaaacagcgtatggatatgactgtaataggtggctttgctgctttgtccatctttgattattttaattttatcttcgttatggaaagatgctttttccacctgaagtcttgttaataactggtctggagttgagattccattttccagaagttttgctgccagttccacggcaaaagtatgagagtgaacagtttcgatgatcttttcaactgttgcccggtacgtgtctgcctctgaatagaataccgatgtcagctggaagagagcgttcatatcctctatttcttttaatggcagagtacagtattcatccagtttgcttctggttgtaaacaaaatctggcagcgatattttaatactactgacagaaagctgtcctgtgtggcagtgacattaaaattatctatgataagcagagtatcagatttcagggaacgcagaaaacggttatgtctttgaaaccgttcctggtcagtgctttccggcggatcgtcaataaaatccatgtcagtaatatcctgatgaagattgccggtatattctatataaagtatattggtgtattgctttatgtaccgctttgcgtaggctttgacaagttcactttttccgattccggcgattccgcaaaggaaaacatgacggttttcctcaagcacggtatataattcttccagttctttatctcttccgataaaatgacggcatggtttcggaacctcactgtccataatataatccagcacaatgggggataaagcgcctccggcgagcagcttctgatttttggtattacgtttgatgaattggcgttccatgccaaaagaaatcagttttgcaagaaacagcagtcttgaactggctggtttatataagggagtcagatttttcttttttgcatctgagatgctgtcatcctgaatgaataaagtgtaaatatcttgtatagccatattacagtcagacatcagtggaagaagattctggtggatggtatgggctaatttttcctgagtggatggcttggaatagtaagcggatattttaggactgattttagcctgaccagtcatccagcggcaaaccagaccgttgtccattgaaaaatcctgatttgtcggatcatccataaaatcttcaaataattcgtataaaaaatcaggctgactcatttgattactttcgctgatatgattttttaagcaagtgctaatagaagaaaaatcgcatcgattcaatagaaattcccctttcgtagttaagattaagtatatctatcataacacgaacatacattcgattcaagaaaatacggatatttttaaagtgattgtgtcaatttacaatcaatttctattcaatgtggttttccggcaggttctgtaaaataagctcagatcaaaacaataacgggaggagcttatgcaacagaatattgaatttgagcggtgcattgattttctggtacggatgattgataagtacggcgaagaagtcctccgggagttggaggaagaaaaacagaataaggaagaaaaagaagcggcagtttcctgaaatacaaaatgtaaatcagactgtcgcttttttcatgcatttttaaatcaaataaattttaaaagctgatgcagagtgtgtggctcattattctgggaagcggtaatacgagtatcaaatggcttgaaatgattctgcgtataaaagctcagaagaaattcattatcttcgcattcaagaaactccataacgccacctacggaatatttgagactggatatggtttccagtgcaaatcccagtagaatatttccaggaattcgtttttcctttggaagagaatagttctttcccaactgggcgatcaggtaagctgcggtagtataggattgtgtttcttcatccaaaatactgacacgggacagcttttttgccattgtcttgctgatatttgaagcacggacagagatgggttttactgtaagtgaaaaataaccaaccagtgaagcatcttcagcaccaaataccagataagtgatagattgatcttttttggtaaactcaatcgcattatgtaataaaaagtattccacatcgggatttttgggacaagaaaaatcggagagtaagtcgtaaagactttcctctccgatatatgtcggttcgtctttatccaaatatgcccgaatattaacggtaaaatatttatcagacatgttttttcttcctttttgacattaaagctaagatttccttggggttcgttaactgacgtccgggaagtgtctgctttggtgtgcggtcacggtcagcttcgtcaattgctgcgacaaaacgctttacgctatttggattggatacgacaaaattatgagtaatacttgaagtagccatactaacacctcctcttttttggcttttttgtgtatttatagtatatgcaatgtgtgataaaaacacaatatcgaaaacaaaaataatttctaaataattttcaagccggacatttattagacgcttccggtaagcgaacaatattttcgagccaatcatttataagtcgccaatggtgggcgggcaatattttgataacagaaatgctctgtatctaacttaattatacgattggcgaagaaatgcgtcaatacggaaaataagtattgaaaatagttggaacaagtactaaaattaagttgggacattgaatggaagttatgttacgagataataagaattgtaggtggaaggtttgaacatagaagcatatgatgctgattcattgagaaaaatggttaggttgcttgaatatgagaacaagatattaaaagataaattgaagaaagcaggcatttcatatgaagaggtgaatccttttgaagaaaaaatagaaagtgcagaagaatatgacctggatcaagggagtcgtattgtaaatccgccatatattacagagaaaatggcaatacgtttcttttcgatgttttggggaagagaagatgtatatgccagacggggaaagaacgggggttattttccacaatgtgcaaatcgttggaatgaccggctttgtcctaaacaacgtaaagagaaggtattttgtgatgaatgtgaaaataccaaatggataagtctggatgtaaaaaaaataattgctcatttgttaggcacaaaagaagatggatcagatgtaataggtgtatatcctttactgccaaatggaacatgcagatttattgtatttgattttgataatcacgaaaaaggagcagaggttacggactttgcaaatacggataatgagtggcataaagaagtggatgcgcttagaaaaatgtgtgagcttaatggtatcagacctttagttgagagatctcgatctggaaaaggtgcccatgtatggattttctttaaaaaggcaatacctgcggcaacagcaaggaattttggatttctcctgttagacaagggttcaacttccatcaatctgaaatcttttcattattatgatagaatgtatccttcgcaggatgtggcaagcagcataggtaatttgattgcattgccattacaggggcaggcacttaaaaatggaaatagtgcttttgtagatgaaaattggaatgcatatcctgatcaatgggatgctcttttcaataaaacaaaaaagctgggaatagaagatgttgaacaatgcatggcaaaatggcagggagaattagcagaagtcagaggaacgcttactaatattgagaagaatgtcagaccgaaaccatggaagaagaaatgtgagttttgtaagtcagatgttgtgggcaagcttcatatggtattgggcaatggagtttatattgatactctgaatcttatgccaagaatacaaaatcaggtccgtagtttggcggcatttgataatccggaattttacaaaaataaaaggctgggatattctaattattataatttcagtgctgtatatttaggtaaggatatagatggatatatacagattccgagaggactgcgggaaaatattatacaggaatgtgaaaaagcaggcatttcagttgatgtttcagatcaaagagaaacaggacaacctatcagagtatcttttaaaggtgatttgcgaatgcaacaggaattagcagcagaaaaattattatcacattcagatggggttttgagtgcggcaactgcatttggaaagactgtagtatgtagttaccttattgcagagcgaaaagtaaatacgctcattttgctgcaaagtaaagatttgcttaatcagtgggttgatgaattgaatcatttcttagagataagagaagaaccaccggaatatgaaacaaaaacaggaagaaagaaaaaaagaaatagtgtgataggcgttttgcacggaaataaaaatacattgacagggattatagatgttgcaatggttggttcaatgtacagcagaggaaaatttaatgaacggattaattcttacggaatggtaattatggatgaatgtcatcacgcagcttctaacacatctatggaattattgcagaaaataaatgcaaaatacgtatatggtgtttctgctacacctaaacgtggtgacagtcttgatcggatcatctatatgctgttaggacctttgagacatagatttactgcattggagagggctaaggaacaggggattggacattattttgtcctaagatacacaagagtagttgatactgcagaaagcaaggataatattaataaagcatataatttgattagtatcagtaaggtgcgcaatgaaatgatcatagatgatgttataacttgtgttgcaagaaaacaaactcctgtaattttgacaagatttaaggaacatgcaaaatttttacatgatgccttaaaggaaaaagcagatcatgtattccttctgtagggggataattcggataaggaaaatgctgaaataagagtaaaattaaagcagatacctgaaaatgaatcgcttattttggtggcaactggtcagaaaataggagaagggtttgatttcccaagactggatgtattaatgcttgcagcacctgtatcttttgaaggacgcctggaacagtatgtaggtagattaaacagagattatgtcggaaaagaagccgtttatgtatatgattatatcgattcgcatgtgcgttattttgataaaatgtatgcaaaaagattgagaacatataggaaaatgggattttcaatctggacgcaagagttgcaacctaaacaaataataaatgcaatatttgattctgtaaattataccgaaaaattcgagcaagatattgtagagtcagaaaaaatggtggtaatttccagtccggatatcagacaggataaaattgacagatttttattactagtcaagaagagacaggaagtaggggtaaaggtcacagttattacaacagatccggaagatattacttacggaaagtcagatgtatgctatgaattaatcagagcaatgcaattggtaggaataaatgtgataacaagaacagaagtagaagaatgttttgccgttattgatgatgaaatagtatggcatggcgggatgaatctacttggaaaagctgatgtctgggataacttaatgcgtatcagaaattcacaagttgcaacggaattgttggaaattgctttgggatgttctgaggagaggaggaaaagtgaataaaaagataaaatgtgatatctataccagagtatccacaaccatgcaggtagatggctacagtctggatgctcagaaagaaaaactcaagagatatgcggaatttcagaacatggaaatcgtaaatgagtattccgatgaaggtaagtctggaaaaagcgtagagggcagaccggaatttcagagaatgttggataatattgagaatggaacagatgaggtgcagtttgtactggtgttcaagctttccagatttggtcgtaatgcggcagatgttttaaattctttgcagaggatgcaggattttggagtgaatctgatctgtgtagaagatggaattgacagctcaaaagatagtggaaagctgatgatttctgttctgtctgcggtggcagagatcgaacgagagaatatccttgttcagacaatggaaggacgtaagcagaaagccagggaaggaaaatggaatggtggatttgctccgtatggttatgaattagtaaatggagaattgcagattgcagaggacgaagcagagattattcgtctgatctatgacaaatttattcataccaatatgggaatctctgcgattgctgcatggctgaaccagcatggatacaaaaagaaaaaacgacagaataatacactggacgcatttgccgcttcatttataaagggcgttctggataatccggtatactgtggaaagctggcttatggacgaaggaaaaacgagaaagtttctggtacaagaaatgaataccgcattgtaaagcaggaaaattatatgctgcacgatggtatccatgaagggattgtttcagaaacagactgggagctggcacatcaaaaacgggaaaaaacaggtgtgaaatatgaaaagacacatagtctcgatcatgaacatattttatccggaatattgagatgcccattatgtggaagtggtatgtatggaaacgtgaaccgaaagaaaaagaaagacggaactttatataaggattatttctattatgcctgcaaacatcgtcgcctggtagatggtcataaatgtagatatcgtaaacaatggagtgaggagaagattaacaatgcagtggaagaagttattcggaagctggtgaagaatcctaaatttgaagaagcaattctgaataaaatcggttcaagaatagatacagaagaaatagaaaaagagattgaaagactggaaaaacagcacaggcagctgaccggagcaaaaggaagacttggacagcagatggatagcctggatatcatggataaattttatgagaagaaatatcaggatatggagacaaggttataccatctgtatgatgaaattgaaggcgtggagaacagtatagaagaagttaagaatcgcctgctgaatatccggcaacagaaaatatcagaagaaaacgtctatcaatttcttttatattttgataaactatatgataagttcaccgacctggagaagaaagaatttcttaacagctttgtggaacaggtggatatttatgagcaggagcagccagatggcagattcctgaagcacataaagttccgttttccggtgtattttggagacagggagacacaggaactttgttgggacaacgaaagtaccgttgaggctgtggtgttgctacaaaggaagaatatgtagaaatccttgaatttacgcactttgtagagtttttcagtttcagaaaaataggtgaaaatcacaaagaaaagagccttgtgaagaaagtaaccgttgttgttgcgttagacctcgggacggggaacacaaagaatcttgaatatgaaaatgaatagagagctatcagatcattgatagattatagggatacttgttaaaagcgggtgtccctattttttatagggcatttcagaaatggagtgtcttttttattaaaatttaggaggaaaacaaaaaatgacaaacacagcgttaagagcagggaatagcaattctcgcacaattactttcaagggcaagaaacacgaaaaattttatgaggaatatctggaaaaatgcagatatcaggatgtctatcatcaggctctggtttattgcctgggcatcgacagagacacaagagaaaatgtgaataaaatctataattttaaaactggatgtgtaaaaactatgcaattttatttttctctaaccactacctctttgtttcaaacttcacctcctgtagctgttagtgatttcatgagctgtcaccagattgctcacatcagttgacgctcacttgcttaactttctgtcaccagtcagttaggcaataccgcctgtttccaggcggtacctgctttatgaagttaccatcccaagcatctcgtgttccacaacgaacttgatcatataatcatcgatcaatcgtttctgattttgaaacgcatacatcaaagctttttcacagacacggttgatcatccgtgggattcctgcagatgccttatggatctcatccaatgccttggttgtaaatatttcctgcccgcatccggagtaatccatgtggcttgcgatatattgttctgtttcagaacggtcaagatgaggcagcgtacagtacatgtcaatgcgctgccggatggcggcataccgctgtagctttagtttattttcccacagttctgtctgcccaactaaaacaagcgccatgggactcatggaatcaaaccggtaattgagcaaaaagcggaattcttccagcgtctccttctctaacaggtgggcttcatccaggatgcagacaacttttttacgctgtacgccccggattacctcgatctcctgttgcagctgacgctttgaatcaccgcggtagaaacgggattccagccccaactgatccagcaaacctttatagaaccaccttggggtcagttttgagtctgacagataaaggatgatgtaatcctcttttggaagttccgaataaaaccggcggataagcgttgactttccacaccctgaatcagctgttacaacagcaaacatctggcggtccgccacataagccagacgaccgagagtttcccggaaagcattggattcaaacagtttttcgggagggacgtcccggacaaagggggtatgttccatgccaaagaatgattcatacattagccattcacctccttcctgtaggaagcaaatgaaatcgcatctgccatttggcgcctgctctgggtatgcttcgtttccaaagcatccagaaaacgggaagttgtcggtttttgttcctgcatagcagctgggagcgtagcgtgtctatcgcaatacgccccaatctttacaggcattgcctgaaaaggttcaaatccgggatgagaaatggtgatgatctcaggatttgccggatcataggagatttctaccgtatacccgatcaaggccggcttggtttcatacctttgcccgcggaaactgatacaggcacctttatccactttcctctgctcatgatgcaggaaagcttcggctacaacggctgtatccaaaaaagtcagtgggcggctgtcccggttccattcctgaagcggtgagatcccttcttccggaacggcagcgccaaggctttcatagtattctgcgatgccatcatgctttttcttgtggtaatactcatccagatagatggcccataggcggttcagttcctccagtgttttgatgtttttcagctttgattcccggataaaagcatctactacctgatggaacttctcgatcttccctttgcttttaccggatcttggttttgcatacatcacacggatgcccaaccttgcaagggaagaccggatctgttttgcgatatactgtgtcccattatcaaagtaacaggcatcgaaggttccataccgggaaaccgcctgatggaacgtatcttcaatgattgcttcttcctgattatcatagaaccgggaagataaaaggtatctggagtggtcatcgattgccgaggacaggtaagtctgtaccttggctccatttcttccaatcggaagcttgggaccatacttgatatccgcctggatcagcatcatgcggtgtggtttgcagaaacgtttggaagaactgttccttgcatcctggtacatctgcatctgcttttggccgtaaccggccttgtagatatggcgttccaaagtagaacgctttaaagcaccgggtgctgcaagcccttccgtttccaggatgtagatgatctgggcaaccgaccgctcgggaacctccttgcgtagctggattgcctgctccaacagaaactcaaagttttcagggagtttttgtgagcggtgtttctcccggtcagccggctttagccctgtaaactgcctttccgaaaacgctttttcataacggtaaagggaacggaccgatatatgattctcctctgcaatctttttgcgcagctggatccgttttgcatcatccagatcagcctggagaagcggagaaatcaattggaaacgcctgagggcttcttcttcctgccattgttgtttgtttattcttgtattcataaaatagtgacctccttttgagaccactatacccgttggtaccgcgacagacgatgcaaagtaggtgcataagccttaccagcagatcgggactaaaaatcccccgctgttgtaaatctgacgcaagatgatttctaaccagttttgatattggtttctgaaagaatcgagcagtgaaccaagggaaatcctctcttcgttataacccagcaggaactccctgatcgtccttaaatatccgttgatacgttcaagattttcgcagaaccattgcagccagcggagcatggtagcgcaggacgggtagtcttcagaatctaagtcttccggctgtacaacgccatccagcaccccggagatcacttctgtttcgtaatgcttgtacggaacaagacaatccggaagttcattatgataagagtggcagttcttacaataaaaccgccgaatgatcaactgatcttttaaaccgccttcctttctacggatgcgtgggcgtgaatcccggtaacgaagcgtagcctgacagatggggcacatatgggtggtcacactgctctcaacaaaaaacaccaaaatcctccttgaggacaagtgaataatctgatataataaccatggtttagtgaccagggtctcagagtacacaacttgctaggagggtgctctgagaccttttcctttttgtatgctgatgacagtatacaggtcaattcagagacaggcaagtaaatcagtattttgataatttatgaggtcaacaacatgtagcaaagtcaaaagagttgagtactaaactatttggactttgtagtgatgagtctattatctcacatcggatgattttgaacaggtactcgctattttgcgtttactctatcctatctattgttacttgttctggtttttccattcccgcggagaaacaccataaatatttttaaaagcacgggaaaaatgaagctgattttcgtatccgacagcagagccgacatctgcaatggataaggaagtcagctttaataattccgtagcctttaccatgcggtagttcataagaaattcctgcggggagcggccgatcgagttgcggaagatttttccgaaataactccggttgatgccgcataccgcagcgatatcttcaatcgaaatattattctgaaaattctgttcaatataattgatcgcttcttttatgtaataatcactcatgcgtccgctggagaccagctttgtcgattttgctgactgcagcagatagtctaaaaacagatacagatgcccgatgagatggaaggaagattcctgtggatgattgacaatataaagcatttcatcggcaagtttttcccgcaattctttggagtgggaatgataaacgggcgcgtctttgcacaaatctgtgacacttaaagcctcttttacacgtaatccgtcaaattcaatccacatatatttccacggaagctgttcatcggcaatgtaagtgttgatctggccgggaaaaatcataaacccctgtccgctttttacagaataggtccgtgtttctcctttggaattgtttgccatgagtgttccggttccggaaagaacgtagtgaaacaggtagtggttgcgtgttgcaggcccgaatgaatggccgggatcacactgttcatatccaaactgatacatgcacagatcgataaaattttcatttggaaaaatattaaaaaatgtattgctcataaaatactccttatatatcaaaatgcgacatcaatatctattatagcataaaatattgcatttcggtataaaactgaaaaaatatagatatttaaggatgcataaaggtatgttataatcagattatcaaaaaagtaaacggatatattgcaaaaaaggagagaggaatatggcaaaaagaaatattttccgcagtgttgcggcggtgcttgcatttggcatgtgtatgacgggtcttgctggatgcggaagtgaaaaaagggcagacgggaaaacagaaatcgaagtggtttcctacaaaccggaagcagttaaggcatttgaaaagattgaaaagcggttcaatgaaacacatgatgacatccatctgacgatttcatctccaaacgaagcaatgaccattttaaagacacgttttatccgggaggattatccggatatcatcgcaatcggaggagacatcaactattccaactttttagatgcagatctgtttgatgatatttccgatctggatgaagtccagaccgtaaaacaggcatatctggatatggataaggaactggagtttattccaaaggatggcacgtatgcacttccatatgtggcaaacgcggcaggaattttatataacaaagatctgtttgaggaaaatgcctggaaagttccgaccacctggcaggaatttaccacactgtgtgatgaaataaaacagagcggaacacttccgctgtatctgggctttaaagatacctggacctgtctggctccgtggaatgcgctggcagtcggacttaccgattcggatacctgcaatcaggtaaatatgggaaataccacattttccgatacgtatggaccggtagcagaaaagatgcgtgcgcttttggattacgccgaaaaaaatccgtatgcatatggttataacgatgcctgtacagcatttgcccgcggggaatctgccatgtatccgatcggaagctatgcgatcccgcagatcaaatcggtcaatccggatatgaatatcggctcttttacatttcctgcaaatgatgaggaatcagacaatgtattaaattcaggaattgatttacagttttctgtgatgaaagcatgcaaaaacaaagaagcagcatatgaagttttaaaatatctgtatgaagatgaaaccattcagatttatctggatgatcagggcggaattgcctgcaaggatggggattttgcaattccggaaacactcaaggatatgcgtccttacattgaaaataaccgcatggcagattatcaggatcaccattatccgagtgagatgagcgtggatgccatgatccagacgttcctgctggatacaagcgacaatgcacaggaaaagtttttgaaaaaatttgattccgactggaagcgctataaccgggatctgattcggaaagtacaggattatcagaaagaacaggaggatgcacaatgaaaaagaaaatgtcaaacagggacaaaacattctgggtggttatcataccggttgtaatcttattttttgcattcaatacacttccaatgatcaaaggtgtgatttacagttttaccaattataaaggatacggaacgtacgattatgtcggattccggaactatgcagatctgtttacggattcccgagtgggaaaaagctatttgtttacgtttaaatatgcactggcaggaacgatactggtaaatgtgctgagtctgatcatggcagttggattaaacagtgcaatccgttttaaaagtgcactgcgcggtatttattttgtaccgaatattttaggaggacttgtcatcggctatatttttagttttatttttacttacattcttccaactgtgggaaatgtgttccatattggatttttacagaacagtattcttgcaagtgaaaaatacgcatggattggtgtgctgattgttggtgtatggcaggcagttgccatgaataccattatttatatttccggtctgcagaccgtcccggaggaagtttacgaggcgagtatgcttgatggagcaagtaaatggaaacagttctggaaagtaacatttccactggttatgccgtttgtaacaatcaatctggtattgagcacaaagaattttctcatggtattcgaccagatcatgtctttgaccaagggaggtccggcacagagcacggaatccatttcttatctgatatataaaaacggtatggatggcggacagtttggattccagagtgcaaatgcagttatattctttattgtgatcgtggcgatttcacttttccagatgacagttatgaataagaaggaggagcagttatgacgaaaaaaaagcagaaaacaaacttggtacttacaattgttctgattctggggacattaactgtatttttcccactgtatatggcagtgattattgcatttaagaaaccgagtgagatgacaaacgatgtggcgggtgcactttctttcccgaaacaatggagttttgaaaacttccatcaggcaatggaagtgaccgatttctggcactctcttggaaacagtttactgatcacactggtaacgatcgtactggcaatcctgatccactcaattgcaggctacgtgatcggacgcggcatggcaagaaaaaaaagtttccgatttatttatctgtatattgtcagcggaatgtttgttccgttttccatcttaatgatgcctctggtaaagcagacggcgcatatgggacttggaaaccgcgcgggtgtcatcctgctgtatctggtattttacatgccgatgaatgttctgctttacagtggatatttaaaaaatatcccggaagcactcgaagaagcagcagatattgacggggcaagcacctggacgacttactggaaagtggtgttcccgatgatgaaaccgatgcatgcgacggttgcgatcctgacagcccttggaacctggaacgatgttatgacaccacttgtaatcatgtccggaaccggacagaatacactgccacttgcacagcttaacttccagacacagtttggaaccaactacaatctggcgtttgcctcctatattctggcactgatcccgatcttgatcttttatgtgatctgccagaaacagattttaaatggtgtggcaaacggtgcagtcaaaggataaagaataaatgaggtgacttctatggcaattatatacaatccaaataaaaaaatatttaccctgcatacggcgcatacaacttatcagatgcaggttgatccactgggatatctgttgcatttgtactacggagaaaaaacaaacagttctatggactatgtcctaacctatgcagaccgcggattttccggaaatccttatgcagccggtatggaccgcacctattcgctggatgcgctgccacaggaatatccgtcccttggcaccggagattaccgcaatattgcactgaatatcaaaaatgaaaaaggggtggaaagtgcggatctgctttttaaaagctatgaaatccgaaacggtaaataccggttgcagggacttccggctgtctgggcagacgaaaaggaagcgcagacactggaaattgtcctcgcagatgaaaacgcacaggttgaagtacatctgctgtacggtgttttggaagaaaacgatgtcattacaagaagtgtccggattaaaaatacaggaaccgggcagattacgatcgaaaaggcagcggcagcctgtctggattttgtacagggagagtttgatgtcctgcggttttatggaaaacatgccatggagcgcaatctggagcgtacgccgctgggacatggaaccattgcgtttggcagccgcaggggaacatccagccatcagtataatcctgccgtgattctggcagaaaaagggacaacggagaccgcaggcagctgctatggaatgctgtttgtatacagcgggaatttctcctgtgaggcagaaaaagaccagttcaaccagacgcgcctgcttctcggattaaatgaagaactgttttcctatccgcttgcgtcgggagaaacctttacggtgccggaagttattttatcttattcggcagagggattgtcggcattgtcgcagcagtatcataactgcatccgcaaccatgtgtgccgtagcaaatatgtccatatgcaacgcccagtactgatcaacagttgggaggcagcttattttgattttacgggagatacgatcgtggatctggcaaaagaagccgcttcccttggaattgatatggtagtgatggatgacggctggtttggaaaaagaaatgatgacaattcttccctgggggactggcaggtcaatgaaacgaaactgggaggcagtctggcagagcttattacccgtgtgcatgagcagggtatgaaatttggcatctggattgagccggagatgatcaatgaagacagtgacctttaccgggcgcatccggactgggcgatccggattcaggggaaaaagccggtgcgctcgagaaaccagttactgcttgatttttccagaaaagaagtgcgtgactgtgtctttgaccagatctgtgtcgtgctcgatcagggaaaaattgactatgtcaagtgggatatgaaccgcagcatggcagatgtttatgccggaaatctttcctatgattacgtccttggtgtctatgatttcatggagcgtttgtgcagccgctatccggatcttctgctggagggatgcagcggtggcggcggcaggtttgacgcaggaatgctttattattccccacagatctggtgcagcgacaataccgatgcgatcaaccgcacaagaatccagtacggaacttcgtttttctatccggtttccgcgatgggggcgcatgtttcggcggtgccaaatcatcagaccggacgggtgacaagtttccatacccgcggggtgacggcgatggcgggaactttcggttacgaattaaacccggcgcttttatcggatgaggaaaaacagcagatccgggagcagatcaaaacgtataagaagtatgaaacgctcattaacgagggaacgtactggcggctgtctgatccgtttacggatgaaattgcggcatggatgtcggtatcagaggaacaggatcatgcactggtaagtgtggtgcgtcttatggctgaggcaaatcaggcgaccgtttatgtccgcctacgtgggttaaaaccggatgctgtgtatctggaagaacaaagcggcagacagtattccggtgcggcactgatgcatgcgggaattccgcttccgccgtttaccgaggaatatgaggcgtatcagtttgcctttaccgaactgaaagaggcgggaagattatatgaaaaagtgcagaaatggtgtgacgggaatgccgaaaaccgggtggtcatcagcatttacggtggctccggttccggaaaaacaacgcttgcaacggcattgcagcagtattttttaaatgacggaaccgaatgttatctgctctctggcgatgattatccacaccggattccaaaacgcaacgatgaagaacggatgcgtgtgtataaagaggcaggggaagacggactgcgtggatatctcgggacaaagaaagagattgacttcgaccggatcaatgaagtgcttgcggcatttcatgagggaaaagattcgatcacattgcggcatatgggacgggaagatggcgagatttcattggaagaaaccgatttttccggaatatccgtattacttctggagtggacacacggaggcagtgacgatttacatggtgtggatctgcccgtctttctggaaagttccccgggggagaccagggagcggcgcatccgcagaaaccgcgatgagaatgccgcaagcccgtttatctgccgcgtggtagaactggaacaggaaaaactcgaagtgcagcgcaaaaatgcaggattgatcgtgggaaaggacggaagtgtttatgaacagtaaaccgatgctcaatgcatatccagacagtcttggaagaaatcttggggatatcgtaacattgctgaaaacggaggctttgcagaatgtattttcttctttttacattctgccgagcctgtaccattccgatctcgaccggggattttccgtgatcgactatgacctgaatgagcagcttgccgaccgggaaggccttgaccagttaaagaatatgggaatcgatctgaaactcgattttattttaaaccatgcttccgcacagtccccgcagtttcgggatcttgtggaaaaaggggaagcttctgcgtaccgcgattttttcatcgattggaaccatttctgggaagggcatggaaccatgacggaggaaggctatatccagccggatgaaagctgtctgaagcagatgtttttccgcaaacccgggctgccgatcctgatggtggaatttccggatggaaaaaaagtgccgtactggaataccttttatcaggaagtgcatggcagacagtatctcggacagatggatgtaaacatccagtcaccaaaagtgtgggagttttatcgtgaaacactggaaaaaatagcctcttacggcgcagcgattgtgcggctggatgcctttgcctatgcgccgaagacgccgggaaagaaaaactttctcaatgatccggaaacgtgggaacttttacagaagatccatgcgctggcagaacctttgggacttacgcttttgccggagatccacgcagcgtatgatgaaaaaatatatgagacacttgcagaaaaaggctatgcaacctatgactttttcctgccgggactggtcattgatgcgattgagaaccggcggggaacgtaccttgcggcatgggcgaaggagattgtggaaaagaagatctccacggtcaacatgctcggctgtcacgacggcattccgcttctggatttaaagggactgcttccaaaagaggacatccagtcgttaattgaccggattgtatcccgcggaggcatggtcaaaaatttacatggacaaaagaatctgtattatcaggtaaatgccacgtactacagtgcattgggagagtcggatgaaaaaatgcttctggcgcgggcaatccagatgtttatgccgggcaaatcgcagatctggtatctggatctgtttgccggaaaaaatgaccatgaagcggtgcagcgcgcgggagaatccggacataaggaaatcaaccggacaaatctttccactgatcagatcacggaagggttgaaaaaagatgtggttcaaaaacagcttgcgttaatccgcatgcgaaatacccataaggcattttcggaaggcgcagaggtagcaatctccggaggggagaggtctctggaaatccgctgggaatataatagtgcatttgcaacattatatgtaaattttgaatcaggaacatatacaatagtagaaagcaaatagttaagttgggctgtcgattgtacatgaaacctaaactttataatggaaataatcatagatgaaacaagccacatagggataatgcccggtggcttgttttgaaaatggataatttaaatcttataacttcggatttcgtcttctcaggaaattttgacggatgtcttcctcagaaagtcggcgtatctgctccggttctgaaaagaaacggtcctgtggggacagtccacggagggaagaatggggggattggttgtattgttggacaaaagcgtacagacttctcctcagctcttccagtgaatggaaatcccgcatatcaagggcgggcatactttgctatggctgctctcataacggacatcagattgataaagttatcattgtagaacacatcgatcctggtaatgaaccggctggcatcatcgatcagggcaatgatatagtcccggtgttttttccatccgaatctgtaaggcggggaccggcactgctgtctccacaccagacttcgttgatatgagggcgttcatatcggcgcatatccttgttcggtgtctgccgcagttccaactgaaaatagacaattctgaataaaatcggttcaagaatagatacagaagaaatatcaggatatgtagacaaggttataccgtttgtatgatgagattgaaggtgtggagaagaaagaatttcttaacagttttgtagaacaggtggatatttatgagcaggagcagccagatggcaaattcctgaagcacataaagttccattttccggtgtattttggagacagggaaacacaggaactttgttgggtcaatgaaagtaccgttgagacggtgtgttgtctacagaaaagagagattatatgagtaaaagaaagaagatcaaaacgacaaaagaacaaattgtagagtactgggaagcagaagtggatgagtgtggatttttcagaagcacatgagagatgctcgagaagtggatgtaagagacatctttagagatgccatatagttccagaatcacttggaggagaagatattccatcaaattatgtattattatgcagtaggtgtcatctggataatccaaatgttgctgatccggagattatgtgagattggctgagagcttataggataagtttttatgatatgttttggcaagtccagggggatgaaggaatatgaaaagatttacgcgtgttcctttcaatacagcaaccttggcaggcattttcagaagggcattgaaagaatatgatagagtgcatggaagggtgacaaaacggaatgttgttccttatattaaagtaactgaatatctgtaaagagtgaaagcgtattctggtaaggtgggagaatgaaatctgcattgggaaggttaaaggaaaatcatggaaatggtaaaagcgatcgggctgaagaaatattatgttacagacacctatgaagtccatgcattggatggagtgacattttcggtggaagatggcgaatttcttgcaattgtgggaacctcaggaagtgggaaaacaacgcttttaaatttgcttgggggtctggatgttccgacagaaggcggtgtctggatccgcggaaaaagcttgaaagatatggaagcagaagagcgaaccatattccgcagacgaaatatcggatttgtatttcagcagtacaacctggttcccgtgctcagtgtgtatgaaaatattgtacttccactgcggctggatggaacagggatcgatcaggaactctttgaggaaatcgtgatgctgttgggaattcagaatcaactggagcggctgcccggaacgctttccggaggacagcagcagagagtggcgatcgccagggcattaatgacaaaacctgcagttgtactggcagatgagcctacgggaaatctggattcggcaaacagcagtgaagtgatcgggctgctgaaatcctgtgcagagcgatttcatcagacagtacttgtggtgacgcatcaggaagaagtggctcagatggcagatcggatcatccgtattgaggacggaaagtatcagatggagggataaaggatggagacaaagacatttatcccgaatcagaatcagcaggtgcttgggatgctggcacgtgaatttggaaaatggaaccggggaagaaacagaattcttatgagtgcagttacgctttgtattgtgaccctgacgatggtatttggaattgcctctggaaagacaaaagcagagtatataaaggctgtaagggcggaaggaacaactgcttcggtccggattgaacatgcagacaatgggatatatcagaaaatcgaagatctttcctatgtgaaagaaagtggccgcagtatatctgtgggagaggcgacagtttccgaaaaacatgtatgtaatctggaggtgttggatacatctgcgtggaataaactggtaagtcccgcatacacggagattcatggacattatcctgagaaaaagcaggaactcatgctttctgcaaaaagcctgcagcagctggggattgaaacgccgaagcagggaatgaagctctcattgacagtacagatcggattgtttcagacagcacaggagacatttctcttaagtggatggtatacggattatacagattcgcaggcctcggttggatatgtatccgaagaaaaaggaaaagagtggggatatgatctgcaggaaacatcagatattttgctcgcacagacggacgggatggaatggcagaaaacagaagaacggctgtatcaggatctgggaagcaaggaactgaagattacagcagataatacatttgcttacgaagcgatcaatcgtctgacaggaggctatgagctggctgcatgtggcgcgttggttattcttttcgggatgtttttactgatctataatgtgatgaaaatctctatgaacagagacatccaacagatgggacttttgtatacgatcggaacgacaaaacggcagataaaaaggatttattttcggcagatcctggcggtcctgctgccgggagttttgctgggcagtcttttttcggggatgatcttgtaccttctgattccgaaaattctgggaagcaggtatttaaacggatatggcggctctggagagttccaggtgttttctcctgcaattttgttggccgcggttggttttgcggtgattcttacgcttggaacggcgtggcttgtgatccgccatgtagtcagcacatcttgcgtggagagtagcacagccatttacggaatctgtcaaccttcaaaaagaaaggtgaatttgaagaagcggacaaaaacaggagaaatcggctatatggcatggcagaatgtaagaagatacaaagggagatttctgcttacggtgatctcgctgtttctcggcgtggaaatgctgctcgcatctgtggtcattacagaaggaggcgactatacccatgtgatagaaaaacgaccggattttctgattgccggcatgttcagtgactggggaatggagcagggatatgggaaggaataccagtcccgggatgcaggatatgatccgatggagacagaaggagataattttgagctgttgtatggaaatgaatatgaggagttttcaccggtttcttcagaagtgcgggatagactgctggagctggatggtgtgaatcgagaggattcttatgttatggagggagcctatctgatgactacaatttccggaaaaggaatccgtccgctggaggaaaacgggcagttatcgaaggaaaaggaagactctatgctggagggatttacagaagatacggttcagattcttacggatgaagaaatggaaaagcttgcacgttatgtgaaagagaaaaatcttccggtggatattgagagtttgaaagaaggcgacggagttgtaattcttcatgaccatcagctgaacccgaaacaggaagaagaagccagagaaagcgtgggagaaccactgtatttttcaacgatgttgtcagagcgggactggaggcagtggaaccagctgagtccgaaagagcgggatgaacagacaaaagcaggaactatgcagagaaaacagtcagcaacattttgtctgagtggatatctggacaaccgggcagaaggattcccagatatccgtcagacgtggcatggaagcgaaggaattatttattttctgatcagtgagaaaggctttgcaaagattccgacagagaaaaagacgctttatatggaactgaatgtagaaaacaaaaaagaagcagtggtccggaaagaaattcaaaatattttggaggaagaaaacaaaagacggagaaacgtgtccgcaacaggagtagaggatcagagtggagaagcgggaatcttctgtatcagcaagtcggaattactggaaaatgcgaaagatgatatccaggggaatcggattatttttggaagtatcagtattgtgctgttgatggcaggaatgacaaattacttaaatatcgtggtcacaggaatcttttccagaaaaaaggaactggagatcatggaaagagtggggatgacgaaacggcagaagcgtatgcttttcatgatggaaggcggatactatttttgtgcggtgacagttctgcttgtgacaattggaagtgtcatgttacaatggatcaagacgtatatggaaataaaactttcgtattttgtatttcaatatccgttgatctggctggttgtcggtctgtgttgtctggcaggaatcagttttgcggttcccgcaggactgtatatgcttgaaaaaagtcactgtgaacaataacaaaaaaggaaggagaatttacatgtttgagagaattgattacagagtgatcagaatcgacggagagtatgcgtatctgcaaaaactggaagatgaaaatgcagaagaaaagtgtgtggcaatggcactgctccctccggagattcaggagggctgccatattgcatatgagatgatggaatatcggataatctgcttataaatgatgttttttacgatactgtccgggcgattctccatattcacgaaggaatagtctggaaaaatagtttgcgtcagagattcctgattgcaaacagatttcctggatgggaagagtggtgctgaccagaagccaggctgcgtgttttaaacgtttttttagaaggaactgtctgggggtatgaccggtttcttctttaaaacgtttgatcagataattgacggaaacatccagttcagcagcaagatcagaaataagaaaatcctgctgaaatgagtgttccaaatgatagagagtacttaaaacaaggttgctgtaagagtggtttttaaattcatggatcgcattgcagtattcctgaatcagtcgttcatgctcttggttaattgattcaatattctttgcgtcacggatattctgggcactttgactagtcagccagtcaccgagttcagcgggaaggccagcctccattccggcaagacggattgtggttcgtgtaaccgcagcagagattcttgcaccttccagagtatatccgattcgtttctttaaaaaatcgacagaattatgcaggcttttccagttttttaaagctgcagtacgattcccgagtcttatgttttccataaattctaattccgttttgtagcgctcctgtaccagcatggaataaggtttatacaggatatcagtatcagaagcattttggttataaaatgtgtgtgcatcaatacgaagaatttgtctggtagttgattcatgtaacatatgtttcaaaatgcaatgggcaagatgcagaatactgctttcttgtgtaactggaaagcgacttcggtatatgggaagatctgtttcagatactccgtttaggcgagttaatttttccagtcttttgtagtcctgagctgttaagatttctgtgcagtaaggtccgattgcgacaggaagatcatctacccagaaaaaacagaagcgaatctggaaacagtcggtataacataagagtttatcatgatcaagtgcatgaaaaagccattttaatgtatctgtttttaaatagtcctgtttatcgtgaaattgccaggttttgcagaagttgcggaaatctttctcagaagtgagaagggtaacagtaatattagagacatcctgaatgacctgacaaagttcggttaatttcataatttactccttaaaatgattttgtgctatgtttgatgattttattctatcatatttgtggatgatatgatactttttatgcagaatttgagctcagataaaattacaggaataataaaggaggacatcacagatggcaaaaaattttgaacagttggcgaaagatatcgttgcgaatgtaggtggagaggaaaatgtgatttcgttgacacattgtgtaacgagacttcgctttaaattgaaagatgaagataaagcagatggaacaaaattgtctgcaatgcagggagttttgaaggtgctgcagtctggcggacagtatcaggtcgtaataggaaaagatgtcacagacgtatatgatgcagtgttgcggactagtcacatcacagcggcaggtgaagatggaccggcaaagcaggatactggttcaaaagaaggaaaaacagagaagaaaaaagaaaaaatcggttctgctctggtagatgtgatttccagtatttttatgccgtttatgggggcatttacaggatgtggtcttttaaaaggattgctggtacttctgacaacgatgggagttttgagtacagaaagcagcacttatacattcttatatgcggcgggggacagtattttctattttatgcctatttttcttgcatatacggctggaaagaagttcggtgccaagccgtttatgtcaatggtaattgcgtgtacaatggtgtatccgacgattacgacattgtatcagtcaggagacggagctgattttctgggaattccagtacagttgatcagttatacaagttctgtattgccgattatttttgcatgcttttttcaggcaaaatttgaaaaactttgtgacaaactgattccgaagctagtacgtggtatttttacaccattgttggtacttttagtagtaattccagtttccctgatcgtgattggacctgtgacaggtgtaatcggagatgtgctggcagatgtgatccagaaagttttgcaggtagcaccggcagtgggaggatttgcatttgcggcattgtggccggtgatgattatctttggtgtccactgggcatttattccgatcgttatgaacaattatgcagtgctggggtatgacaatctacttccgcttacggtaggatgtaactttggaattgcggcggcaacattggcaattttcctgaaagcacggagtgttgaagagaaagaaatcgcaggatcagcaagtatcagtgcgctgatcggaggagttacagagcctgcgatttacggcgtattgctgaaatataaacttccatttattatcgtatgtctggcaaatggaattggcggagcaatctgtggaatctttcatgtgacaagaactgcgcagatgacagtaaacgttcttacactgccggcagtttatgcaatgtatggaccatgggctatcgtttctgttgcaatttcaactgtggcttcatttctgctggtgtttttatttggatgtaaaaatttgaagaaggagaattaaagtatgttagaatattccgaattatatccgattcagaatgggcacagaatgatgcaaagtctggatggaatgtggaaatttcaatttgacccagaagaaattggggaaaaatcaggatgggaaaatggattgcctgctccggtttctatgcccgttccgtccagttttgcagatttttttacagaccataaagagcgagactattgtggtgatttctggtatgaaacagaattttaccttccggcagaatggcgcaataaaaaaatctggctacgttttggaagcattacacatcgtgggacagtctattgtaatggaatggagatcacaagccatgaaggtggatttttgccggtgctggctgacatttcaacagtggcaaaaccagggcaagtcaatcaggttgttgtaaaaattaataatgaattgaatgaaaccagtttgccgtgtggtgcaacgaaaatattgaataacggaagaaaacttgcgaaaccatattttgatttttttaattattctggattacagagaagtgtgtgggtgattgcactgccagaagaaagtgtcaaagattatagtgttgattatgaactgtgcggaacagatgcacttgtgaaatatgaggtagtcacaacaggagaacatccggttatagtcagattgttggatgcagaaggggaactggtagcagagacggaaggaaaagagggaatcctgcaagttgcgaatgctcatttatgggaagtgagaaatgcatatttgtaccagattgtaatcctcattacagatggaaatggtgtgttagatgagtatcgtgaaaaaatcggaattcggactgttcggattgagggaacccaaattctgttaaatgatcggccggtatatttaaaaggatttggaaaacatgaggatttttcaattcttgggagaggatttcactggggaattgtcaaacgtgattttgaatgtctgaaatggaccaatgcaaactgttttcggacaagtcattatccttatgcagaagaatggtatcaattcgcagatgaagaaggatttttgatcattgatgaagttccggcagtgggaatgatgcgttctacccggaattttgtggcagcaggttccggaaattatacatatttctttgaagcattgactgttcctgaacttttgaaatcccacattgcagatacagaggaaatgatcacaagagataaaaatcacccatcggtgattgcatggagtttgtttaatgagccggaaaccatcacagattatgcatatgaatattttaaggaagtatttgcagcagcagaaacatacgactttcagagtcgaccaatgacaggggcatttgagaaaaacagcaagccggaattgtgtaagtgctatccactatgcgattttatctgtctgaatcgctattatgggtggtatatcagtgggggaccggaaattgaagaggcggaagaattattccgggatgaaatggatcgctggaaagcaaaagaactgaatgttccatttgtatttacagagtttgggacagatacaatggcaggattacataaattaccgagtattatgtggagtgaagagtaccagaaggaatatctggaaatgaatttcagggtatttgacagttatgaatttgtacagggagaactggcatggaattttgcagatttccagacaacagaaggaatcatgagggtagatggaaatcataaaggagtttttacaagagacagacagccaaaagcggcggcagttgtgtttaaagacagatgggagaagaaaaatgaacttttttgagagaatcagaggaacaaaaaagagaaaagaggcgcaggaatcaggaatcatatattcaccattaaaaggaactgtgattccgttaaaagaaattccagatcctgtttttgcagagggaattttaggatttggttgcgggatacagccgacgtcggaaatggtatatgcaccatttgatggagcaattgtacaagtatcagatacaaaacatgcagtaggactaaaaagtgcggatggaacagaagttttgattcatgtaggcatggatacagtagaaatgaatgggaatggatttactacttttgtaaagacaggagacaacgtgaaaaaaggcgaaaagctgatagagttttcaatatctgaaatagaagcggcaggatattcgtcagttacagcagttgttgtatgcagtgtaagtgaagcagaaaagattaaagttcttaaagcagatgaaatacagacgggagaagcattgttaaaagtagaataatggaaagagacggctgtacagaaaggaagacagaatgaaaaagttttgtgatggatttttatggggtggagcaaccgcagcaaatcaatatgaaggagcgtggaatcttgatggaaaaggtccatctgtatcagatatgtgtacgaatgggacacacacgaatcccaaaagagtgaccactgttttagaggagaatacacgatatccaagtcatgaagcaaccgatttttatcatcgatacaaagaagatattgcattgtttgcggagatgggatttaaagtgtttcgaatgtccattgcatggagcagaatttatcctacgggaatggaagaaacgccaaatgaagaagggcttcgtttttatgataaggtatttgatgaatgtaaaaaatatcagatagagccactggtgacgatttcacattatgaaatgccatatgcactggttgaaaaatataatggatgggaaagcagagaatgtatcgggcattatgtaagatattgtaaaacaatttttgacaggtatcaggataaagtaaaatactggctgacattcaatgaaattaacgcaggaaccctgccacttggaagtgtgctctcgctcggtacgattcggggatactcaggtcctgttacagaggtgtgggatcgtccaaatgaacgatttcaagcccttcatcatcagttgctggcaagtgctcaggcagtgaaatatgcacatgaaaattaccctaagtttcggatgggagatatgaatttattctgtacaatgtatccacttacctgtaatccggacgatgtgattgcgacacagaaagaaatgcagatgatgaactggttttgttcggatattcagattcgtggtatttatccgtattatgcagatcgctattttgaagaaaagggcattcgtattatcatggaggagaatgataaggaaattttaagagaaggaactgtagatttttatacatgtagttattatatgagtaattgtgtttcaacagatccaaaacatgcaaaagtttccggaaatctgttgggtggaattgcaaatccctatttgaaatcgagtgactggggatggcagattgatccacagggacttcgttatgcactgaacgaaatttatagccgttatggaattccaatcatggtggtggagaatggactgggggcggttgatgagttagaggaagatggaagtattcatgatctctaccgcatcgattatttacgaaagcatattttacagatgaaagaagccgtgcaggatggcgtagatctgatcgggtatactccgtggggctgtatcgatctggttagtgcatccacaggagagatggcaaaacgctatggtatgatctacgttgagaaatatgatgatggaacaggaaatctgaatcgacgaaaaaaagattcattttattggtatcaaaaagtgatctcttcgaatggagaaatactggattaggaaaaccgtcccattttacgaatcggtaaaatcttgcaagattactttgacagaatacctgtctggtattatgataaacatcagaaagaccagaaaggagtgcacaggaccagtctggggcggctgtgcaaaaaatgtgatgaaagtaataaaaaataagacaatctatacggggaatggagttattgaggatggatttgtaagatatgaaaagacgatcgccgaggtaggctccatgcagaattttgtatcaagagaagaggatgagattgtagaagtggaaggaatgtatctgattccgggattcattgatgtacacagccatggaggttatggtctggacagcatggatgcatcggcagacgagattgactggatggtcagacagatggctgcaaaagaaggaattacttcttatttctgcacgacgatgacacagacttcagagaatattgaaagcgccatgaagaatatcaaagcagcggcagagaagaacccgatcattcagggaatccatctggaaggaccgtttatttccgtgaattacaagggtgcacaggatgcatcttatatccagaagccggatgcagcagtcttaaaatactggaatgaactgagcggaaaccggattaaaatcgtgacttatgctccggaagaagcggatacagaatttgaagactggtgtctttcaaatgggatcgtaccaagtgcaggacattccaatgcaacttacgatcagttgtgctgctgcagagcatgtcatgtaacccatctttacaatgcccagagaggtcttaatcacagagaaccgggtgtgacaggttatggacttttgacagaaggcgtgaaagcagagatgatctgtgacggcatccatatcaaaccaaagatggtatatatggcatataaagtaaagggcagcgatggaattgaacttgtgacagattctatgcgggcaaaaggtatgccggaaggaaaaagtgagttgggcggtcagacggtctatgtgaaagatggcacagcgagactggaagatggtacgatcgcaggaagtgttcttacttatatagatgcatttcgaaatatcatgaagtttacaggggcgtccttacaagaagcggtgcagatgagttccggaaatcaggcggaggaatttggactcactcaaaaaggagctattgcagttggaaaagatgcagactttgtgattttaaaagaatcttcagagaacgagtatcagttgatgaagacgatcagtatgggtgagcctgtagaggcatagagaaaaaaacaaaggagggatcgtgcgtttgggacgattcctcctttgggtttatagttgaaatacctgcgttgcaatattgaagtagattaaaatggaacaggtgtctaccagagttgtgatcaatggggatgccatgattgcaggatccatatgcagttttttagcaatcaatggtaaaacacatccgatcagttttgaaattacaatcgtagcaaccagagacaatccaatgaccagagcaagtccggcatttttgtacatgatcagaatgcggattccgttcgcaagtgcaagtgcaactccgacgatcagagaaacacgaaattctttaaacatgacccgaaacaggtcggaaaattgaatttctcccaatgcaattccgcggatgatcaaggtggaactttgagaaccacagtttccgccggtatccatcagcatggggatgaaggatacaagaagtggaatcgcagcgaaagcgttctcgtatctggtaatgatggttcctgtaatggtagcagaaaacatgaggatcaaaagccaggcaattctgtgctttgcatgtgcaaatacagatgtttcaaaatagcttttttcactcggactcatggcagccattttggtgatatcctcggttgcctcatctaccataacatccatagcgtcatcaaatgtgacgattccgaccagccgcttgtcctgatccagaactggaagggcaagaaaatcgtattttgtaaacaattgtgccacttcttctttgtctgtatgtgttgagacagaaataatctctgtctgcatcagatcttggatcagaacatcgtcggcggttgtcatcagatctttggcactgacgataccaagcagtctgcgctgatcagttacatagcaggtgtagatcgtttccttgtggattccggtctctttgatatgtgccatagcctgggcaaccgtcattgtctcccggatatcgacatactccgttgtcataagactccccgcactgtcatccggataattgagaagctgattgatcaaagtccggtcggcctgatctacggtatttaaaatccgattgacaagattggcaggaagttcttccagaagatccaccgtatcatccatataaaggtcatcgagcagctcttttaactccttttcggaaaacatctctaccagataagtctgcatggaatgattcatattggcaaatacttccgcagctttatcttttggaatgagacgaaatgcaagtgcaagttctttatcgtccagatcggaaagaagtgaggctatatctacttcgttcatcacatccagaatgcttctgacagccttgaactggcgctgtgcaaggagttttacaaaaatttctttgttcatcgttcaacactctcctttttctatttaattttctgaaaaatcccgaaggatgactggctccagcgtccataacctcaccacctttttgtatgtattaaaaatatctgcaaaagaaaaagcctcattgtcgtgacaatgacagcatatgcagcaaatttccgtccttattctatctcaaaaaaagtaaaagtgtcaagaaaatttgtgtaagtaaaatatgaacaaattgaaaacagcagcagggtaaacggcaaggaaagagggttattgatttacagttgcaccttgttatgctaaaatgaagagcaggaattgaaaaaggagcaggaagatggatgcatatacaagttttgcggcagtgtatgatacctttatggataatattccatatgaagaatggaaaagctatctgaaggaattgttaaaagagtatggcgtgcaggacgggctggtgcttgatctgggatgcggaacaggaaccatgacggagcttctcgcagcagatggctacgatatgatcggagtggacaattccgaggaaatgctggagattgccagagaaaagcagatcaagtcaggacatgagattttatatcttcttcaggatatgcgggagtttgaactgtatggtactgtgggtgcggtatttagtatctgtgattctctgaattacattacagagccggaagaattgaagcaggtatttcgctgggtgaataattatctggatccgggcggaatttttatttttgattttaatacagaatataagtaccgggaggttctgggtgatcagaccattgcagaggccagagaggactgtagctttatctgggacaattattattatgaggaagagcggatcaatgaatacgaactgaatctgttcatcagagaagatgcggaaagtgagacagagggtgatctctatcgcagattccgggagacacatttccagagagcatatacgttagaagagatcacaaggatcgtggaagaatccggactgcagtttgtgactgcatatgaagcgtttacaaaagaaccgccttctaagaacagtgaacgaatctacgtgatcgccagagagcagggaaaggtacctgtgaaaaaagcagaatagaatcattataatagaagaaacaggagagataagatgaaagattatattgtaagagcaacagcagcgaatgcgcagatccgtgcgtttgcggcatcaacaacagagcttgtggaagaggcaagaacaaggcataatacaagtccggttgcgacagcagcacttggacgacttcttacagcaggtgcgatgatgggaagtatgatgaagaatccgacggatgttttgacgctgcaggtgcagtgcggaggtccgatcggagggatgacagtgacagcagacagtaagggggaagtgaaaggatatgtacacaacccggatgtgatgcttccgccgaagaacggaaaactggatgtaggcggtgcgcttggaccaggatttttaaatgtgatcaaggatatgggactcaaagaaccatattccggacagacgattttgcagacgggagagattgcagaagatctgacctattattttgcaacttcagagcaggtgccatcctctgttggcctgggagtattgatggaaaaggacaataccgtgcgatgcgcaggtggatttatcgtacaggtgatgccgtttattgaggaggaagtgctcagcaagctggaagaaaacatcaagaatattcagtctgtgacagcaatgctcgacaatggccatacaccggaagaaatgctgaaccacgttctggagggattggatgtagagatcacagatacacttcctgcaaaatttgactgcaactgttccaaagaacggattgaaaaagcaatcatcagtgtcgggaaaaaagagattcaggagatgatcgacgatggaaaggatatcgaagtaaaatgtcatttctgcaataccgcctatacattttctgtagacgagctgaaggaacttttgaaaaaaagcagatagaagtgatgtgtccaaatagggaaagtgaggcagtagaatgaaacagggatttatcaaagtggcagctgccacaccggatatccgggtggcggacgtgccgtttaatacaaaacagatatgcagtgccattgaagaagcacagaacaatcaggcaaagatcgtggtatttccagaattgtgtgtcacaggatatacatgcggggatctgtttacacaggatgtacttttgcaggcagcaaaacaggcactgcttgaaatcacagagtttacaagagagaaggacatgcttgtgtttgtgggcgtgccgcttgtggtggatgcaaagctctacaatgtggcagcagctctttgcaggggagaaatcctgggactgacgacaaagacatttcttccgaactatggtgagttctatgagatgcgtcagtttacggcagggccggatgtgccgggagaaatcctgtttaacggcaaaaaagtgccgtttggtccggggcttttgtttcaggcatcctctatggaagagctgatcgtatcggcggaaatctgtgaggatgtgtggtcgccgattccgccgagcatccgtgcggcaatggaaggtgcaaccgtgatcgtcaactgttcggcaagtgatgagacgatcggaaaagacagctacagacgggagcttatcaaaggacagtcagcgagactgatcgcgggatatatttatgcaaatgcaggcgaaggggaatccacgacggatcttgtgtttggaggacacaatctgatcgcagaaaacggcagtatcctggcagaggcaaagcgatttgaaaatcagattatttatacagaactggatatcaaaaggattgtcggtgaacgtcggaaaaacacgacatttacgatggcaaaagagaaagtgctgccaagaatctcatttcctctggatgtgtgcgagatcaaactgacaagagagtttccgaaaaagccgttcgtgccgcaggatgaaaaagaacgtgctctgcgatgcgaagagattttgacaatccaggcaatggggctcaaaaaacgtctgctccatacccacgcaaacacggcggtagttggtatttcgggcggattggattccacattggcattgattgtgacagcaaaagcgtttgacatgatcggaaaagataaaaaagagattcttgcgatcaccatgccttgctttggaacaacggacagaacgtatcggaatgcctgcaaaatggcagaacagctcggagcgacgctgcgggaagtgaaaattgcagattccgtaagtcttcattttcaggatatcggacatgatccgaaagaccacagtgtaacgtatgagaatgcgcaggcgagagagcgtacgcaggtactgatggatattgcaaatgcgacaaacggaatggtaatcggaaccggagatatgtcagaactggcgcttggatgggcaacctacaatggagatcatatgtcgatgtacggagtgaatgcttctgtaccgaagacgctggtgcgtcatcttgtcaaatatgcggcagacgtgactgaggatccaaaattgcaggaagtcctttatgatgtactggatacgccggtcagccctgaactgcttcctccaaaagacggggatatcgcacaaaagactgaggatctggtgggaccatatgagctgcatgatttttatctgtatttcatgctgcggttcggatatgagccgagtaagatctatcggcttgcagtgcagacatttgaaggggtatatgagaaagaaacaattttaaaatggctgacaacattctgcagacgatttttcaaccaacagtttaagcgctcctgtctgccggacggaccgaagatcgggacagtggcactctcaccaagaggagactggagaatgccaagcgatgcgtgtgcccaagtgtggatgcgtgatctggagaagatttccctataagcattgaaaagagaggtgtttagaagtatgaaactgatcaagaccgaggatgcagtgggctgtgtgctttgccatgatattacgcagatcatcccgggggtagtaaaagatgcggtttttagaaaaggacatgtagtgacaagggaggatattccggttctcctttccgttggaaaagagcatctgtatgtgtgggaaaaacaagaagggatgcttcatgaagatgaggcggcagagatcctgcgcagcgtgtgccagaatgcacagatggatgcgtcaaagccaaaagaaggaaaaatcgagctgacggcacagtgtgacggggttctgaaagtggacaaggagaaactgtgcaggatcaatgccatgggacagatgtgtatttcttcccgacacggaaattttccggtgaaaaagggagataagattgcaggaatgcgtgtgatccctctggtgatcgaagaagaaaaaatgaaacaggtaaaggagatagcaggagagactcctgtttttgcgctccttccgtttcagaagaaaaaagcagcgatcgtgacaaccggaagtgaagtatatcacggaaggattcaggataaatttactccggtggtccggcagaagttggaagaatatggagtagaagtgcttggaaatacaatctgcaatgatgaaccggatatggtgacagaggcagtcaatgactggatcaaaaaaggtgcgcagatggttgtgtgtaccggaggaatgagtgtcgatccggatgataagacaccgctggcaatccgcaatgcttccgatgaagtgatcacatatggcgccccggttttgcctggtgcgatgtttatgctggcctataaaggtgagattccgatcatgggcctgccgggctgcgtgatgtatgcaaggcgcacgatctttgatctggtactgccaagacttgtggccggtgaacggctgcaggatcaggatttttacagactcggagaaggaggactgtgtctgtcctgcgaggtgtgtacgtttccaaattgcgggttcgggaaagggtaatgaaaaaggagcgtgaaaggatgagtgaattttataattctctcgcagaaaaaatgcagagaggttcctgtgttgttatgacagtattagagggagaatcggcaggaaagaaattacttgtgacagagccggtggagcaatatgagggacatgcagtgttttgtgagtgtgcaggttctttgcccaggctggtgatctgcggaggcggtcatgtgtccatacctatgatccggatggggaaaatgctgggatttcaggtgacggttcttgaggatcgtcccaaatttgcggacaatgcaagagtggcaggcgcggatgtggtgatctgcgattcttttgagcatggacttgaaagcatatcaggaggagaagatacatattttattattgtgacaagaggacaccggtatgatgaagtgtgtctgggagcaatcgtagagaagccaaatgcttatattggaatgatgggcagccgccgcagagtggcgatcgtcaaagaagagctttttgagcagggacatgaacgtgagaagctggatgaggtgtacacaccgattggcctgaagatcggcgctgagacaccggaagaaattgcagtgtctgttatggcagaaatcattcaggtgaaacatgaaaaagcagaaggatgcggatattccaaagaattgttggaggcgctgtgtgatgaggactgtaaaaagcagaaaaaagtacttgcaacgatcatttccagaaaaggatctgcaccgagaggcgtgggaacaaaaatgctgatcctggaggatggaacactgatcgacacgatcggaggcggatgcgcggaaagtgatgtgatcacaaaagcactgctgatgatgcgggaagaaaaagtgcggtttcagatttgtatggtggatatgacaagggaagctgcagaagaggaagggatggtctgcggcggacggattgaagtaatgctggaacgagtttagtatccgttactgttcacagtaacttcgtataccggattcatttttcatggaagagctgttgacattcaaaatagggaatgttaatataaatttaacatagtgaaagcaataattgtgcgaattgcataaaatggtgcttatataggttcataattggttggacgtatctaccagctgccgcaaacagctgactataagcagagtgggatgggaaagtcccggtctgtagtcgggcggaaagagtaggaggtcagtcaatgaatgaacctgtttttatattaaaagggaatattgtatacagcaaaaataaagatgaactaaggatcttaaaggatcactatctgatcagcgaaagcggtctggtcaagggggtttttgagaaagtgccgccagaatatgcacaggtatcggtatctgattatggggagtgtctgattattccaggactgacagatctgcatgtgcatgctccgcagtatacattccgggcaatgggaatggatatggagcttttggaatggctggagacgaatacgtttccggaggaggcaaaatatcaggatctggagtatgcccggcgtgcatatcgtatctttactgacaatctaaagagaagtgcaacgacaagagcatgtatttttggaacgatccacagagatgccacactgcttttaatggatcagctggaacaaagcggactggtgacgtatgtgggaaaagtgaatatggatcgcaactgtccggattatctcagagaggaatcggcagaagaatcagggattcagacagtggaatggatcaaggatgtattgcataaaaaatatcagaataccatgccgatcctgacgccaaggtttacaccgagctgcagtgatgaactgatggagaatttaaagaaaattcagatgtattaccagattccggtacagtcacacttatcagaaaatccgggagagattgcctgggtgaaggagctttgcccgtggtcggagttttacggggatgcttatgacagatttggattgtttggggcagactgcaaaaccgtgatggcgcattgtgtgtattccggaaaagaagagcagcagcgaatgaaagaaaacggagtatttatcgcccattgtccggaatccaatatgaacttgtcatcgggggtggcgccggttcggacattcctggaggaaggactgcatgtgggaattggaagtgatgtggcagggggctccacagaaaatctgttcaaagcaatggcgcttgcaatccaggcctccaagctgcgctggaggatgcaggatgacagtttaaaaccactgacattggaggaagtattttacattgccacaaaaggcggcggtgaattttttggaaatgtgggaagctttgaaccgggatttgaactggatgcagttgtcctggatgacacaagaattgtgcattcgcaaaatctggatgtgagagcacgtctggagagaatgatttatctggcagatgagagagaagtacgtgcgaaatacgtgcggggcagagaaatctgtctgcaataaaaattgggaatgtcaaaagaaattgcggaggtgacgtatcatggaggaaagagaacatgtagtcggcaagagtgtaacgagagtggatgctttggaaaaagtgaccggacgggcaaaatatacggaggagctgtgtgataaaagcgcttatattgcgcgggtactgcatgcgaatatcgctcatggaatcgtaagatcagtggataccagtgaggcgcaaaaactttccggggttgtaaagatcgtgacttgctttgatgtgccgaaatattatttcccgaccgcgggacatccgtggtctacggatcctgcacatcaggatgtcaaagaccgcctgcttttaacggagcatgtgcggttttacggggatgatgtggcagcagttgttgcggagaatgaagtggcagcagctcaggcgctgcggctgatcaaggtggagtatgatccccttccgtttgttctggatgtacaaaaagcaatggaagaggacgccccgcagcttcatgaaaactatccgggaaatgtgttgaaacacactttgatccacaagggggattttgaaaaagcaaaagaagagccggggctgatcaaagtggagggctggtatcagacaccaactgtgcagcattgtcatattgagaattttatctgttatgcgtatatggaacagggcaggtacgtgatcgtctcttctacgcagattcctcatatctgcaggcgggttgtcgggcaggcgcttggaatcccatggggaaatgtgcgggtgatcaagccatacataggaggcggttttggaaacaagcaggacattttatatgaaccattgtgtgcatatctgtcacagacagtcggcggacggcttgtaaagctggatgtgtcacgggaagaaacgtttgtatgtaaccgggtacgccatgctatccggacacatctgatctcttatgtgcgtccaaatggtgagattgctgcaagaaaagcggagtgcttttccgatcagggggcgtatgcatctcatggacacagcattggagcaaaggctcttggatctttcccgcagctgtatccgtgtgagaactttgagggagatgtgtacacgatatttaccaacaaaccggtatcaggagctatgcgcgggtatggaatcccgcaggcgatgtttgcgatggaaagccatacggatgacattgcggtaaaacttgggattccaccgtatgaatatcgctggaaatatctgatgccaaaaggatatacggatggattttcaaaaaatgtcaattattatgataccttcagggaatgcatggaaaaaggcagtgtcagtgtagattatgagcgaaaacgcagagaatatgcacaacaaaccggggatatccgcaaagggatcggaatggcggcattctggtacaataccggtgtctggccgatttctctggagacatcctcctgtcgtatggtcatgaatcaggacggttctattcagatgcaggtaggggagacggagattggacagggcgcagatactgcatttgcgcagatggcggcagagacactggggattccgtttgatatggttcatgtgatgaccatgcaggatacggatatcacaccgtttggtcttggagcctatgcgtccaggcagacctatatggctggattttccattcggcagacagcagagctgttaaaaagtcatattttggatacggcagtggaaatgacgcggcagatgaaagaaaatctggatattatagatggaaacattgtgcgtacgacagacggcagtgttctgatgtcattgggtgagctggcaacagaaaaactctacagcctgactaactgcggacatctcacggcagagagtacctatcagatcaaaaacaatgcctactctttcggctgtacctttgcggaggtagaggtagatattccgggatgccgggccacactgacgaatatcgtcaatgtacatgactgcggaaggctgatcaatccggcgctggcggaagcgcaggtgcatggaggcatgagtatgggaattggattcggacttttcgaagagctgaaatttgatgagaaaacaggaagacctttgaacaataatcttctggactataagatggcaacatttgaagatcatcccgatctgcacggagagtttgtggaaaactatgagcccaccagtgcttacggaacgaaagctctcggagaaccgccggtatgttcggttgcgccggcgatccgcaatgcgattttaaacgcaaccggatcagggctcaatgagcttccgatgaatccgcacaggctgtttgtaaaattccgggaagacggattgatttaatggggaaaggtcgtgaacgaatatgtatgatatcaaagcgctccatgaagcagaaaatgtacaggatgccatctgccttctgacagagcatccgcaggcacagatcattgcagggggaagtgatgtgctggtccagatccgtgagggaaagcgggcaggagtggaacttgtcagtatttatgggctggatgaattaagaggagtgagtctggaagaagatgagacgctcagaatcggatcactcaccagtttttcccatatcacaaaaaatgaactgatccagaaatatattcccgtccttggggaagcggtggatatggtgggaggtcctcagatccgcaatatcgggactatcggaggaaacacatgcaatggtgtgacttctgcagattcggcgtctacgctgtttgcgtgggatgcaatcgtagagctgacaggcccggaaggcatcagaagacttccgatccgggagttttatatcaaagccggaaaagtggatataagacagggagagcttcagaccggaattttgattccaaaacaatcatatcagggataccggggacattatattaaatatgccatgagaaacgccatggatatcgcaacccttggatgttctgccaatgtaaagctttcagaaaataagacagtgattgaggatgtccggattgcgtatggtgtggcggggccgatcccgatgcgtgcagttcatgcagaagaaactggacggggaaaagaagtatctgcacggacactggaagaaatcgcggagcaggtgctttttgatatccatccaagggacagttggagagccagcaaggcatttcgggagcatatcgcaagagttttatgtcagcgcgctctaaaagaggcgattgtcagggcaggaggtgtcatccatgagtgagaagcagtataaactggtaaaatgtatcatcaacggagaatacagggagaccatggtggatgtccgcgcatcactgacggatatgctgagaaatgattatcggctgaccagtgtaaaaaaaggctgtgaagtcggagaatgcggagcctgtaatgtgattattgacggtgagtgttttaactcctgtatttatctggcagtatgggcagacgggaaaaatatccggacactggagagtattctgggaccgaatggagagttgtcagatatccagcaggcgtttattgatgagaccgcggtacaatgcggattctgcacaccgggagtgatcatgagtgcagtggagattttagagtcaggcaaagaatatacaagagaagaattacggaaacttttatcaggacacctgtgccgctgtaccggatatgaaaatattttgaatgcggtacaaaagaccatgtacaaacgactgggaaaaactgaaaattaggatttaggtgctgtcgcataagttcttttttgaaatctggacacaatatctgtaaaaagaaaggacagattatgaaaaagaatatggctggattgattctggtattatttgcgatcgcactttttatgaccggatgtgagaaaaaagcgcaggaaaaagaagaagcgcaggaggcgtcggccagacagctggtgatccagaaacagacgcagacagaaatcgcagaaaaaaagatcgaagaaaaaagacgagagctgcccaatcaggcacagattgaaatggaagtgatcctgcagaagccggaactaccgaccgggtgtgaaagtgttgcgctgactatggttttgaaacagaaaggatatccaatcgaaaaaaccacgattgcagaagaatatctgatctacaatcgggacaactatgcatccgggtatgtgggagatccctccacgtatggtggggttggcatctatccgccaggacttgtaaatacagcaaactgctttttgaaacagcgatatcagcagcatacagcgtatgatgtcagcaagctgagtctggaggagctgcttccgtatgtggcagccggaaatccggtgcttttgtggctgacatcagatctggaagctccctatttttcgagtcagagtgtagagtatggaggggattcatatcgatggtactggaatgaacactgtgtagtgcttggcggatacgatctggaaaagcaaagcgtgacgttgtttgatcccctgaaggggaaagcagaggaatctcttgagcgggtagaggaaatttataatcagacaggaaaatatgcaatgacggtatactaaaaaacatctgtgaagaacaaaaaataaagttcttcacagatgttttttatggtctgctgtgtgattcaatatgatttttgatcgcttcaaaactttctttgctgatgatgtgttccatgcggcaggcatcttctgcggcaatagcttcatctaccccaagctgtgtcagccatgcagtcagaagcttgtgacgctcataaatcatatcggcaatggcttttcctgattcggtaagatagataaatccttccttcgtaaccgtgatatgttctttctcacgaagattcttcatggcaacactgacgctggattttttgaatcccagttcttcagcgatatcaacagagcgtacaaccggacgtttctgacttaagatcagaatcgtttccaggtaattttctgcagattcgtttgtcttcaatgtatgcacctcgtttctcgttaaattgtctttagtatatcatattttagaagagacggcaaatactataatattattgacaacttacgaatgttagaatatactaactaaaaagaaaaaatagtcagtaacagattcaaaaggaaaggggagcggactgtgaatgctgtgaaaatgcaaagagagataattttgcagagattgaaagagcagggatgcaggattacaaagcaaagattggctctcattgacattattttagaaaatgagtgctccagctgtaaagaaatttattataaagctgtcagaatggatgagaagattgggattgccacggtatacagaatgataaatatgctggaagaaatcggagcgatcagcagaagaaacatgtataaagtagaatgtcccggggcttgtccgaaagaagatgcctgcgttgttgtgttggatgatgaaagcgtgtgccggatttctcctcagaaatggaaagctatcgtagaagaggggctgcaggcatgcggatatcttcataaccggaaagtagtatctatttcttttaatccggaacagtgcatgaaaggtatgatctgagagaaaacataaaaaagagattgacaaatgaaaggaataagaataaactgaataatgttagaaatacctaacacataatagttttgaaatataaaagttagtattgattggaaaggagagattatgatgcctttgacgatggcagcagcaaacgaaatcaattatattaagaaagtcggaggaaacagtgaagtgaaacgtcacctggaaactcttgggtttgtagccggaggagaagtgcgggtgatttctcagttaaatggaaatctgatcgtaagcatcaaagattccagagtcgcgatcagcaaagagatggcaaacaagatcatggtctaaaggaggaagagggaaaatgaagacattgcgaaatattgccgtgggtgagactgcaaaagtgaaacggcttcatggcgagggtgccttaaaacgccgtatcatggatatgggaattacaaaaggcagccagatttatgtacgcaaggtggctccgcttggtgatccggtcgagatcacgatccgcggatatgaattgtctttgcgaaaagacgatgcggactgtattgagatggagtaaagaaaggaaagggagagagtgatggcgattaaaattgctttggcaggaaatccaaactgcggaaaaacgacgatgttcaatgctctgacaggtgccaatcagtatgttggaaactggccgggagttacggtggaaaagaaagaaggaaaatgtaaggagaataaggatgtaattgtaacagaccttccgggaatttactctttgtctccatatacactggaggaagtggtaagccgtgactatttattaaaagaaaagccggaagcgatcatcaatctggtggatgccacaaacattgaacgaaatctgtatctgacaacacagcttttagagcttggaattccggttgtaattgcgctgaatatggcggatctgctggaaaagaataaaatcagcatcgatacaaaagcgctggaaaaagaactgggatgtaaggtagtcaagacttcagcattaaagggaaccggaattcacgaagtagtgaaagaggctgtcacagcagcgaaaaaagaaagcattgtttcaggaaaaataaagttttcaaaggataccgaagcggctgtttccgagatggaaggacagttgccttcatccgttttaaaagaacagaaaaaatggtatgcgatcaagctgctggagcgcgatgcgaaagtactggagcagttaaaactgactgcatctgtacagaatcaagtagaaaaaatcgctgccagactggaagaaaagctggatgatgacacagaatctattatcacaaatgagcgttatgaggcaatcacacatgtagtagaaaaatgtgtaaagaagccaaaagaaaaactctcgacttcagataaaatcgaccagattgtgacaaacaggatactgggacttccaatctttcttggtgtgatgtatgtcgtatatgcgattgcagtcatgaccattggaacttatgtgacagactggaccaatgatgtactggtagtagcgattcaggatgcggcggcatccggactgcaggcgatcggtacagcagcatttctggaagatctgatcgtaaacggaattatcggcggactgggtgcagtacttggattccttccgcagatggcgattttgtttgtattgctctctattctggaagactgtggatatatggtcagagttgcctttgtcatggaccgtattttccgtaaattcggactttcaggaaagagttttattccacttttgatttcatccggatgtggaattcctggaattatggcatccaagacgattgagaatgacaatgacagacgactgacgatcatgacatctacatttgtaccttgtggtgcaaagcttccggttatcgctttgatggctggtgtgatcggttcagaggcgacaggatttccggcaggatccctgacatttatcatgtacgtgattggtgttgcgacagtgctggtttccgcaattattctgaaaaagacaaaaccgttccacggagatgcggcaccgtttgtaatggagcttccggcataccaccttccacaggcgaagacagtactgctccatacatgggaaagactcaaaggatttatcagaaaagccggaacgatcctgctgctagcttgtatcgtaatgtggttccttggaggatatggatttacagatggaagctttggggcagtagaggattctgcagacagtattctggcatccatcggaagtgtgatcgcagtgatctttacaccgcttggatttggaagatggcagccggtggcagcttctctttccggattctcagcaaaagaagcaatcgtaacgacaatgggagttctggcaaatgtagccggagatacagaagacccggcagttgtagcacacggtgtcgcaacatggttcccgtcagcggcagccggattcagtttcctactctttaaccttttggattcaccgtgtctggcagcgatcgctaccatggcaaaggaactcaatgacagaaaatggttctggtttgcaatcctgttccagaatgtatttgcatacgtagtaacatttatggtatatcagatcagtggtgttgcgacaggtgcgcttacatttggagcatctacagtagttgcaatcctgctgctggcagttgtcttatatctgttattcagaaaagatccatataaaggaaaagcagtgagtgtaaaacgttctgtggcagaagcctaaaggagaaaaaatgggcggaataaaatcggtagtatctatgggatacgcggtattgtttgtaatacttctttatttagttggcattggaatctcgagtctgatacaatatataaaaaagaaatttagaaggtgataatcgtgaatgcagcaacatgtattattttgatcattttaattgtaattgtttcgttttcaatccgtgcgacgattcgtgatcggaaaaaaggcggatgtgcagggtgctccggatgcggcggaagctgcagcggatgtcatagtgaagtggaacagacaaagaaatccgagtaaataagagcagaatgaaaagtgtggtatcagcagagtgtaaaatcttgaaaaaatgcactgtggtaccacacttttttgatagaaaaattgataaaatttatcgataatcggatttttgattgacgaatgaaaatcagggttctagaatgagtgtaatgtaaccagaaagtacaagtgatcgatggattgtagaaagaagggaaacagatgaaacaacaccgattttgggcgtgggcaacagtatgctgcgcagtaatggtattttataccggttacaaacataagtaagatagaaaaagagaatcagtttacaggaggaagaaaagatgttagatgtatttaaaatgaaaaaattagggatttttgcaggtggtgttttattcggaacagcaggagtgaagctgttgtcaagcaaagatgcaaaaaaagtgtatacaaattgtacagctgcagtgcttcgtgcaaaagattctgttatgaagacagcatccactgtacaggaaaatgcagaagatattctggcggaagcaaaacagatcaatgaagagagagcagcaaaagaagcagctctggagcaggaagcagaagaagtaacagaagagacagtggcagacaacacagattttgcagaagaggcataagataaaaagagggatttgattgaagtttataattaagcatgaaataccgggaagaatacgggtgcatatggtgcagccgaaaatgacgtttgaagaggcggatattctgctgtattatctcgtaaacctggaaaatgtgacaaaagcaaaagtatatgaaagaacacaggatgcggtgatctattatgaaaaggaccggcgggaaatcatcaaggcactgcagaagtttgggtatgatcgggtgacagtgccggaggggctgactgagcattccggaaggcagatgaacgcagaatatcaggaaaaactgctcatgaaagtcgtgatgcgttttggtgggaagcttctgataccggcaccggtacgggcggtctggacaggtgtccgttctctgaaatatctgcagcaggggatcgcgagtctgaaaaaaggcagactggaagtggcggctctggatgccactgcgatcggtgtttccatcctgcgcagagatatgaataccgcaagttcgatcatgttcctgctcggcatcggagaattgctggaggaatggacacataaaaaatctgtcggagatctggcacgcgacatgtccctgaatgtggggaaagtctggcttttaagagaggaacaggagattcttgttcccgcaaaacagattgaaccggaagatcttgtagtagtccgcatgggaaatgtgattccatttgatggagtcgtatcccgtggtgaggcaatggtcaatcaggcctctatgacaggagaagcagttccggtgaaaaagacagcggaaagctatgtatatgcaggaactgttgtagaagaaggagaactgatcatctgcgtgaaagcggtgagcaaagcaacccgttttgaaaaaatcgtgaccatgatcgaagagtctgaaaaattgaaatcaaatctggaaagtcatgcagaacatctggcagatcaactggttccgtatacactggcaggaacgattctgacctggctgctgacaagagatgtgaccaaggcactggcagtactgatggtagatttttcgtgtgcactcaagctggcgattccaatttcggtactgtctgcgatccgggaggcgggcgcacataatattaccgtaaaaggcggaaaatatatggaagctgctgcaaatgccacaacgatcgtgttcgataagacggggacactcacagaggcgcgaccgacggtacgaaaggtggtttctttctgtgagcagagtgaggatgagctgctgagaatggcggcctgtctggaggaacattttccacattccatggcaaaggctgttgtggaagccgccagaaaaagagggctggagcatgaagagatgcacagcaaggtcaattatattgttgcacatggaatttcctccacgatcgaaggaaaacgcgtggtgatcggaagtcatcattttgtattcgaagatgaaaaatgctcggtcagagaaccgtggatccgacagtttgaaacacttccggaagaatgttctctgctctatcttgccattgagcatgagcttgctgcagttgtatgtattgaagatccgctgcgcaaagaagcggcagatgtagtgcgtgctttgaaggcaacagggcttgagaaagtcgtgatgatgacaggagacagtgaaaaaacagctgcttctgtggcgagaagagttggtgtggatgcatattattcagaagtgctgcctgaggataaggcaaaatttgtggaacaggagcgcgcatccggccgtacggtgattatgatcggcgacgggatcaacgattctccggcattgtcggcagcaaatgtgggaattgcaattcgtgacggtgcgcagatcgcacaggaaattgcggatatcacaatctcggcagaaaacttgtgggaaatcgtaatgttgagaagattaagcgaggcgctgatgcggcgtatccagaaaaattacagaagcattgtcgggatcaatgctactttgatactgcttggagtcacaggaatcctgcagcctacgacgtctgcactgcttcataatatgtctacgctgacgatcagcctgaccaatatgaaaaacttactggatgaaaactagttattgagaaaaaatcgataataaccctcttgattttttgaaatagttcctatagaataaaactaaggttagttacaactaacaaacgggaacacacaggaaaattcaggaggtgcgtatgagtattgttattatcggaggacatgaccgaatggtctgtcagtataaaaaagtatgtcagaaatatcagtgtaaagcaaaagtgttcacacagatgtcaggaaatctgtccaaaaagataggaactccggatctggtcgttttattcacaaacactgtttcgcacaaaatggtgcggtgtgcagtggaagaagcaggccgctgcaatgcagagatcatccgctgccatacaagcagcaaaaacgcactggaagatatcctggaaactgcctgtgcagcagtgtaaaaacgatcagcttcaaaagagcaagatagaagagaaatatagaaaaatgtacaaaaaagagagtatacgatacgaaatatgtatggtatactctcttttgatatgaaaaaatgagggatgagggacatgaacatcagaaaaaactataatcatacattgaatgcctgttaccttggctatattacccaggcaatcgtgaacaattttgcaccgcttctgtttctgacatttcagagtacatatgagatttcgctggataagatcgcacttttggtatcctttaattttggggtgcagttgatcgtggatctgctggccgcaaaatatgtggacaagatcggataccgcaacagtgtggtggcagcacatattttcggagcagttggcctggtgggactggcagtgtttccgtccgtttttccggatgcgtatgcaggactgcttctggcagtattttgttatgcaattggaggcggattgatcgaggtgctgatcagtccgattgtagaatcttgtccgacagagcgaaaggctgctgcgatgagtcttctgcattctttttactgttgggggcatgtaggcgtgattctgatctcgactgcattttttgccattgcggggattgagaactggaggatactggctgtgatctgggcaatccttccggcgttgaatgcagtatattttggaatggtaccgattcaggcagaagaggaagacgttgagggaattcctgtgcgagaattatttaaaatgaaaattttctgggtgttggtactgctgatgatctgtgcaggggcatctgaacagggaatgtcccagtgggcgtcagcatttgcagaatcagggctgcatgtagaaaaggcagtcggggacctgtcgggaccatgtctttttgcactgttgatgggaagttcaagactgctctatgcgaagatgagtgagcggatctcattgccaaaaatgatgctctcaagcgggattttgtgcattgtgagttatctgcttgccgcattgtctccaaatccggtgctggcgctgctgggatgtgggctttgtggattttctgtgggcgtattctggccgggaacctttagtatggctgcagcatcctgtccgaaaggagggactgcattgtttgcacttctggcacttgcgggagatcttgggtgttcttccggtccgggagtggtaggcgttgtatcaggagcattttcagagaatctgaaggcaggacttttggcagcaatcgtatttccggttctgctgatcattggactgcaattgttgaaagaaggaagtcgagagagaggggaagtaagatgaaaaaagagatgacaaatgatatgactgtcggaagtccggcaaagctgatcattcagtttatgattccgatgtgtctgggaaatgtgttccagcagttttacaatattgcggattccatcattgcagggcagtttttgggtgtcaatgctctggcagcaatcggaagtaccggttcattgatgttttttgtgacaggatggctgcagggactgaccagtggatttgcaattctggtatcgcagtggtttggagcaaaagatatgaaacggatgcgacattatgtggcaatgtccatttacctgacgattgcgtttgctgtggtgatgacgatcggatttgaatttgccaatgagccgattttaaggctgatgaattctccggaaaatctgatggcagatatcaaaggatatatggcagtcatctatggcgggctgatcgtaactgcggcatacaatgcacttgcggcagtgctgcgggctttgggcgattccaaatcaccattatactttctgatcatttccgcgattatcaatgtggttctggatattgtatttatcgtgaattttggaatgggtgtggaaggctgcggatatgcgaccgtgatcgcacaggctgtttctgcattgttgtgtctgatttatattgtaaaaaaatttccgatcctgcggctttcggaagaagattttcggatttcctttcagagcatgggacggcttctggcattgggaattcccatgggactgcagttttctattacggcgatcggaacgatcattgtgcagggagcggtcaatatttacggagcggtatatatggcaggattttcagctgcaggaaaactgcagaatattattgtgacagtatttactgcgtttggcgccacagttgccacatatgtgggtcagaaccgcggagccgggaaaatggatcgtgtacataagggagtacgatacacgcagatcatggtatttgtctggagtgcggtcacaatggttttggtgtacttctttggagaagagatgacattgttgtttgtgagcaaaacggagacagaggtacttcatgcagcggaagtttatttccggacggtgttctgggcatacccgtttttaggaagtatttttatctatcgaaatgcgctgcagggaatgggctacggtcttgttccgatgcttggtggtgtgtttgaactggcggcaagagcgctgatcgtacttttggtggcaggaaagacgagctttttcggtgtttgccttgcagatccggcggcatggatttcggcattgattccattgattccgtattacatttatgtgatgaaaaaatatgaaaagcagaaacagctggagggatagtgcataagagaggagacaacaggtggagaacattcatctgttgtctcttttttgtcagttgtgttgtgaaatgtgcaagttgtgcaaaaaaactcaaaaagagaaggacatgtggtaaagtatgaacatagaaagccggccggcactatagagaatatgagaatacgggaggaagaaaaatgttagcgattaacatggcggatgtggtaaatgtattgaatacatgtaaaccttatctgattggatttggtattgtgcttgcaattgcactgattgttctgattgcggcatttaaactgaaaaagacaaaaagaaaactggtacgttcacaggctggaattgcaattctgttagcattggtgatcgtagtaaatatgatttgctggggaccgatgtcaagcatgatctctcttgcaaccggaaacggaacaatttcagaagagacatcaaatgaggcaaccaaactggtagagaagattgcggaagaaggaattgtgcttttaaagaatgaagacaatatgcttccgatggaaaataataaaaagttaaatgtatttggatgggcatcgacaaatccatgttatggtggaacaggttccggttctttatctgatgcatatgagacagtatctttacttcagggactggaaaatgcaggatttgaactgaactcagagctttctgatttctacaaagactaccgtgcagagcgtccggaagtcggaatgtgggagcaggactggacacttccagaacctacagtagattcttacagtgaagatttgatcaagaatgcacaggatttttctgatacagcactggttgtgattacacgtgtaggtggagaaggtgcagatcttccgacagatgtaagcaaagtgacttatacagataactcaaaagactacaaagactttgagccgggagagcattatctgcagctgagccagacagagaaaaatatgctggatatggtatgctctgattttgacaatgttgtagttgtatacaatggtgcaaatgcaatggagcttggattcttaaatgattatgagcaaatcaaaggtgcagtatggtgtccgggaacaggacaggcaggattcaatggtcttggcgtgattttaagcggagaagtgaatccgtcggcaaaaacaagtgatacatttgtaagagatctgactgcaacaccgacagcacagaactttggaaactttacatatgacaatatggatgagtataaagtaacacagacaggctttacaggaaaagaagagacaacaactccttctttcataaattatgtagaaggaatttatgtcggatatcgtttctacgagacagctgccagtgaagggctcatcgattatgataaaacagtactgtatccgtttggatatggattatcttacacaacatttacacaggaaatgggcaagattacagaaaatgacggaacaatttcctttgatgttacagttacaaacacaggcgacacagcaggaaaagatgttgtagaagtatactataacccgccgtacacaaacggaggaattgaaaaagcatctgcgaatctgatcgcttatgacaaaacaaaaagcttagagccgggtgaatcccagacactgacaatttcctttaaagcagaagatatggcatcatatgactatcagaaagaaaaaggatacgttctggaagccggtgattatgagatcagcatcaacacggattcacatcacatcattgaatctgaaacttatacagtggatgaaacagtgaagtatacaggagacaataaacgttcgactgaccagacaactgtggaaaatcagtttgactatgcggcaggagatgttacatacttatcccgtgcaaacggatttgcaaattataaagaagcaacagcagcaccagagagtctttccatgtcaaaagaggcaaagaaagaatttatcaacaacagcaactataatccggaagattataacaatgaagaagataaaatgccggaaacaggtgcaaaaaatgatattgaactggcagatttaagaggtgtcgactatgatgacgcaaaatgggatgaactgcttgacaatatgacaatcagtgatatggatactgtgatcgctctgggcggatatcagacagcagcagcttccagcgtaggaaaaatacagacgattgactgtgacggaccggcatctatcaataacaactttacaggaacaggttccatcggattcccgtcagcggttatgatcgcatgtacatggaatgatgagattgcaatggaattcggagaaagcatcggtaaaatggcagatgaaatgggggtatccggatggtatgctccggcaatgaatattcaccgttctgcatttgcaggccgtaactttgaatactattcagaagatggactgttatccggaaaaattgctgcaaatgcagtagtaggtgcagaaaaatacggcgtgtatgcatatttgaaacactttgccctgaacgatcaggagacaaaccgtacaagtatgctctgtacatggtcaaatgagcaggcaatccgtgagatttatctgaaaccatttgaaatctgcgtgaaagaaggaaaagcaaaagcagtgatgtcttctttcaactatatcggtacaagatgggcaggaggctcagaagaactgtgcaataccgtactccgtgacgaatggggattccagggatttgttctgacagattactttggtgtatatggatacatgaactctgaccagggtatcagaaatggtacagatgcaatgcttgttgcatatgatacagaaacaaaccatgtaaaagatcagaagagcgcaactggtgttgaagcaatgcgtcaggcttgtaaaaatattatgtacactgtagtaaacagtcgtgcatatgatgcggaaaatctggaaacaggtctgatgacatggcagattgcagcaattgcagcagatgttgtactgggtgtgggaattcttgcacttgaaatcgtggcaatcaaacgcttccgcaaacgccttgcagaagagaaggcagctgtagcagttgagaactaagcaatagcgaggagatagaaatggaaaacacggcaaagaaaggcttctgggggacttttaaagaaaaacacccggcagttgcacagtttatcgtattctttattatcagcaatggagtgacagtacttcagatgatcatgatgccggcaattaaatatgcgtttggttttacatcccttgtcaatacgaattttcagattctgccaatcggacataatctggacggcagcgtctactatgtatttgattatgcttccggagcaatcagctccggaggcggcggaggacttgcatatttccttgcagtggagatcacactttttctggcgcaggttatcaattttttcctgcagcggaacgtgactttcaaatccaatgcaagtgtagtcaaagcggcagtatggtatttcattgcctgggtattgatctctgtaggcgcagcggcactgcagggactgtataaaacaccaatctatgatttctttatgggaatgatgggagaaggtgcgggaatgacagtagctgatattatcacaatgctgatcaactgtgtgatttcgttctgggtattcttcccgattatgaagatcatatttaaagagaaagaagcataaaaacagagagttattgcaatcgggcaataactctttttttagaaaaaatttttattttatttatagattcaccagaaattctatgttagactatagctatatcggatgccaaacatgctgatatcacagcagtcgaaaaatctttcaggcgtattgccttatcttaagcatccagattcaaatcagtattctgattcaggagcagtttcaaaaaaatcaatcaatcaacaaaaggagaagtatgtgtatgtcagaaacattaaaacaattatttccgaatattcggaccgaagaagcaattataggagagatcaagagtgatgagaatctgctcgcagaatatgagagctggacagaactacagcagagagattttctgaagttctgttcagggatgcggggagtcaaggtgttgtatgacgggtttggaaaggagatattaagcccgatctatcatccggagcgactggaggagctgttgtcctgtatcctggagacagaagtgaagatccgtcaggttataccaagtgacggaacgagaattgcagatgagcagagtcttgttattatggatattgtggtagagctcatggatggaagtctggcgaatgtagagattcagcgtatcggatatctttttccgggagagcggtgtgcgtgctattccgccgatctgcttcttcggcagtataagagtgtcaagagcagaaaaaagagaaattttacatatcgtgatgtgaaaaatgtatatacaatcgtatttatcgaaaaaagtacaaaagaatttcaggaatttccgaatacctatatccatcgggcaaagcagcagtttgataccggactttctgtgaatctgctgcaggaatacgttttggtgccgcttgacattttccggaaaaccacgcacaataaaattatcgaaaacaagcttgatgcatggcttacctttttaagcaatgatacttcggaaaaagtaaaagagctggtcgaaaagtatcccgaatttagagacatgtatcaggaaatttatgacatttgtgagaatgtagaagaggtggtacgcatgttttcaaaagaattgcaggaactggaccgtaatacggtgaagtttatgattgaagagcaggagagagaaattaaggcgcagaaggagcagctaaggcagagtgaagaagagttgcagaagagtcaggagcagctgaagaagaatgaagaagagttgcagaggagtcaggagcagctgaagcagagtgaagaagagttgcagaagaatcaggagcagctgaaacaaaatgaagaagagttacagaagagtcaggagcagttagcacaaaaggatgcacagattgccagacttctggctcagattgaagagaaagatacgtagttgttggtccatttatgatgatagaacaaccagttgtgcagaaatttccccgtttctacggatttgtgatagagtagtcttcagaaaaatgaagagataaagaagtgaaaggtgagaaatatgaaacacgcagaaatcattgcgaaaatgacagttgaagagaaagcagcgatattgagtggagcgtccgagtgggagtcaagagagatcaaacgacttggaattccggcggcgtttttttcagatggtcctcatggagtgaggaaacaggaaggagaaggcgaccatctcggattgaatgcatctgttccggctacctgttttccgacggcagctacgattgcaaacagttgggacgaatcgttgggtgaagagattggaaaggctcttggagaagaagcatcagcattaggcgtagatgtacttttgggaccgggactgaacattaagcgcagccctctgtgtggaaggaattttgagtatttttctgaagatccttatctggcgggaaagatggctgcatcttatgtaagaggaatccagagtcagggaatctatgcatgtccgaagcattttgcggttaacagccaggagcttcgcaggatggcaatgaattcggtattggatgagcggacactgagggagatttatctgactgggtttgaaattgcgattaaagaaggaaaagcaaaatccatcatgaccagttataacgaggtcaatggagtctatgcaaatgaaaatgagcatttgttaaaagaaattttaagagaagagtggggatttgacggacttgtagtcactgactggggggcttcgaacgaccatgtaaaaggagttgcctgtcgatctaatcttgagatgccggcgccgggactggatgcggcacgagaagttctggcagcgttagaagagggaagcctttccatggaagaactggatcagtgtacggacgatcttctggatgcagtactgacactggcaaagaacagagaaaagcgtgtgcgtgaatttgacagagaagctcaccatacgcttgcgaaaaaagctgcaagagagagtattgtgatgctcaagaatgaagaaaaaccgttccagctgcttcctctcaaagacaatacaagagtggcactgatcggagactttgcatctgttcctcgttaccagggggcaggttcttctctggtgaatccaacgaaagtagaaacaatggagcagatgatcagcagctatccgattcagtgtatcggtacagcgaaaggatatcagagaacaggagaagcagatgaagtactgaaaaaggaagcagtgaatcttgcaaagatggcagatgtggttatttactgcttcggtctggatgaattgagcgaatcagaaggtctggatcgtacgcatatgcggattccgcagaatcaggtggagcttctggaagcaatggcaaaagtaaactccaatattgtaggtgtattaagtgcgggatctgcagttgagatgccgtggcattcctgctgtaaggcattgctgcacggataccttggcggacaggcttctgcaggagccatgctggatgtgctgaccggaaaagccaatccgtccggaagactcagtgagacatatccggttcgctatgaagatactccggcatttaaatattttccaagtacagagcgtaattcggaatatcgggagagtctgtttgttggatatcgttactatgatacaagtaaagtgagagtgcagtatccgtttggatatggtctgtcgtatacatcgtttgaatactcagacttgagagtaacggcggatggagttgaatttgtactgaccaataccggaaagatggatggtgcggaagtagctcagatgtacgtatgtgcaccgaaaggaaagatcttccgtccggataaagaattaaaaggattcgcaaaagtattcctgaaagcaggagaaagcagaaaagtacagattttgtttgatgataagacattccgttactggaatgtagagacagacagctgggaaaaggaagcaggaagatatgaaatctgtattggcgcatgtgcattggatatccgattgagagagacactggaaatagaaggaacaactgacacaatgccatatgacgctgaaaagatgccgtcatatttttcgggaattatcagagatgtaccggatgcagaatttgaagcacttctgaagcaaccgatcccggatggaaagtggagcggtgaactgggaatgaatgacgcgatctgccagatgtattatgcaaagagcagactggcaagaatgatctacaagattctcacaaacctgaaaaagaaaagtgaggataagggaaaaccggatctgaatatcctgtttatttataatatgccgttccgagggattgcaaagatgacgcatggggcggtcagcatgaaaatggcagagggtatggcggaagtggtcaacggacatttcatgaaaggtatgaaaaaagtactcggcggtttctttgagaaccgaaaagcaaataaagaatatgagaaaaagctgggaaccggaaaataaggaacttgcgaataagcaaaaggagaaagccaaatcaggactttctccttttgtgtttaagattctacaggaatcagcacctgcagggtaaaccagttgtcttctgcgtgaagtgtcatagagccgccatatttgcgggctgcctgctgaatgcttttcagtccgtatccgtgataacctgcgttttgttttgttgtagtcggaagttgatccggttttaaagaaagcgaagtttccgtatagttttcacattgaatcatcaataattgatttttctgatacatagacagtgtgatcagacgcttttcagggtcatcaaactgggaaacacattcaattgcattgtccagtgcatttccaaagatagagcaaatatctttgacatgcataaaagaaatcagttttccgtcagccatgcaggtgaatgtaatatgcttctgcatacagtaagtgcttttggtagtcagaacgacgtccagtacgctgtttcctgtatttgtgagcgcttcctgtgtgtggatcgcctcctccatttccagaagatactgttcttttttcttgggatcctgttcagaacggatcgcgatcatataatgtttcagatcatgaaattctcttcgtaaaagttcaatattatcgatggaaagccgatactggtcatactggcgctggagaacaatattcatggcctgattttcacttctcatacgaagttcttcccgtttttcctgcatggaaaaaagcatgacaagtcccccgaaatctaccagtgtccgcacatacaagatggaacttgtggcactggaaaacggcgtatttggcatgacgaagctgatgttgctgatggcaaatgctccaagtgcaatgagaattgcgcttaggagttcttttccattgaccagcaggcgctcgtcagtcggaaaatgtcctctttccagaaagtaatatccgatatgaatgcctgtgtataagagcagcatggtcaaagtcgagaataaccgactgtttttggcgtaattcaacgcccaccagacataaagctgccagtgaaaggacgcggtaaattctgccagaaccagtgcctgtgcgcagcagaatccggcatccagccaggtagtatcgcagagcagatgcagaaggaggcacatcagaaatgcggctccgatcatgcagggaatccaaaaataaataggaagagttcctgcaaattcctgataagcgataaatacgagcaagcttccggcaagggaaaccggcagtttccacccggttacctttcgccgtaagagaaggacgtacaggatgcaggcaccccattcagcaagggcggtataaatccggggagtgtccatcagtgcgtctaaattcatcggtgtacacctcctatataatcagtcaaagcttccagaaacactttcttttttgcacggctgacaggaagtgtcgtggaatcagataacaggacattgttttgtacaataccggtcacatgcatcaggtggataagatatgcgttatggcatttggaaaatcctttgtcttttaaaagcgcttccacctttttcattggaccggcagtgagaaaatcccctttttcggtatggaacagaatgttgtggcgctggctttcgatgtaataaatctgactgatatccaggcgcatctgtccgccttccacttcgatcgtcatataatctttttgctgtttttgcttcacctttttgacagcttttccgagaatctgagaaaatgcaagataggcgaccggttttacaacatatcccagggcgtctaccagatatccctgaactgcgaactggatcgtagaggtaataaagataaaagatacatcttcatccagttcccggattttttcagcagtcttcatgccgtccagatgtttcatctggatatcgagaagaatgatatcgtagtctgctttatattcacttacaatgtccagaccatcgtgaaagacggaaatctggaaggaaagggaatgttcggtttcatattgtttcagatacccggtgagtacctgtacataagaatcttcatcttcaacaattgcaattcggatcatagtctctcctttttgttttttatcatttattggaaccagtactattttatcggaatccggcaaaaaaagcaattcttgttacgattgcgcatggataggcggggattggtgtgaacaggaaagaaagcaggttgaaattcctaaaaaagccaagtataataaaaatactgaaaaacaaagaagagaggtttttgagtgaaggaggtaagtatggccgaacaatatcatggtatggcaattggaatatttgaactggacagtgagtgcgcatgttttgtggcactggatgcggcggcaaaggcagcagcagtacagattcagggagtggagagaaaccgtctgggagcaggtgcctgtgtgaagatgcggggaagtatttcggatgtgaaagccgcaatggaagtggcgatccggacggcagagccgatcgcaaaggttgtttcacacacagtgatcgcatccccatctgaagaggcagagacagcaatcgcaatgaccattacaaaataaggagagagtgatatgacatacggagcatttggactggtagaagttctgggagaggcgaatgcggttctggtactggatcggatgttaaaaactgcagaagttttttatgaaacacaggatacaaagtgcggcggacatgcactgatttttgtaagcggcagtgtatcggctgttaaggcagcagtggagagtataaaagaagcgcctccgtgtaaggtgtttcagacagcagtgatctccaatccatcacaggagatggttcagatcgtagaagacttcaaagccagaaataaaaagtaaaagagtgtatgaaaaaggacagcagccgtatgggaagctgtcctttttcgattttatgctgctttggtaagatcggacaacggacggaaggtatatcccatttcctcccattttgagaggagctcctccataatttctccgttggtctttgatgtattgtgaagcagtacgatcgctccaggatgaacgcgggaaagaagtttgtcaaaggcttcttcatgagtaggctgattatcctgctgccagtctacataggcaagactccagaaaaatgtctggtaccccaactgttttgccattttcagattttcagtactgtagataccttgtggtggacggtaatatttgatcatgtcagtgccggtgatttctttatagagagattctacgccggaaagttctttttgaaaattttcgacagaggaaatcttagacatatccggatgactgagtgtatgattggccactgtatgcccttcttctgtcatgcgacggatcaaatccggattatcccggacaaagtttcccacaacaaagaaagcagcaggagcctgatgttttttcagcgcatctaaaatagctggcgtagcgccgttttcatacccgcagtcaaaggtcagatataaaattttttcatccgtatcctgcgcgtagtaagcatcatattgcttcagctcttcaatcgaagcgttggcagtggggagtgttccttcctctggaaaactaaggccccagttttcagaggttgagagaaccgggccggataccggatgaatgccaagggaaagttcggcttttccggcaagagaaccgagtaaaaaggcaagtgtaagaagtaaaagacgacgaaaacagacaaacagaatttttttgtcatgcgtgctaatgttcatagaaaagctccggaacgttgtttttgctactatattcgagaaaacagggaaatatgcttacagtagacttttggagaaaagagtgatacagttaatgcagaaaatgaatggaaaatcagaggtgacatatgaaaaaagcggcattattttttgatattgacggaacgatattaagtgaaaaaacaaaagagattccaaagagcgcgatcgaggcacttttggtggcgcagaaaaaaggacatcttttatttatcaatacagggagaactatgtgctcgattccggcacagttaaagcagttcatgtttgacggatatttatgcagatgagaaaagcaatcttcaggaattttttacgtttatcgaggaagatatggaagcaatcgaccgcggaggcaatacctatgaaattgtgcagaaaggctacagtaaaggaactgcctgcgatgtaatcctgaaaaaattcggaatggaactggatcaggcatatgtatttggagacagtatgaatgatctttccatgtttcagtatgcgaagcatacgattgccatgggaaatcatgcaaaaggactggatccttttacagagtatgtgacaacagaggtagagaaagacgggattgcgcaggcaatccgccattacggtttagattaaaaaggagcggcttatgaaattatttgtatacagttacaggacatttgatgaggatgtgtattttcgggaattttcaaaggaatatggggtagaactgggaatctgtcatcagggaccgtccatggaaaatgcacacctgtcagaaggatatgactatatcagtattcttaccagcaaaatcgacgcagcgctggtaagacgattccaggaactgggagtcaaaatgatctccacccggacgatcggttatgaccatatcgatctggatgcagcaagagcgtgcgggatgaaggtcagcaatgtgacatactcaccggaatgtgtggcagattatacgatgcttttaatcctgatgtccattcgaaaaatgaaacggattctgcagcgggcagagctcaacgacttttcattgccgggaatccagggaggagaactgcataattttacagtgggcgtcatcggaaccggcaaaatagggcaggctgtcatccgggatctgagtggatttggctgtaagatctatgcgtatgatgtctatcgttcagagagtgtaaaagaatatgcagactatgtggaaaacgtgcaggaaatttatcagaagtgtgatctaatcacactgcatatgccattatttgagtccaatttccatatgatcgatgaaaaggcaatggcgcagatgaaagatggtgtagttctgatcaacacggcaagaggtggtctgatcgataccaaagcgctgatcaaaggtctggaaacaggaaaagtcggtgcagtaggtctggatgtgatcgaggatgaatttggattgtattataaggatctgaaatcgaagtgcttaagtaagcatgatctgtgtatcctgagaagttttcctaatgtagttgtgacaccacatatggcattttataccgaccaggcagtcagtgatatggtgaaaaattcgattttgagctgttgtctgaatgagcggggagaggaaaatccctgggaagtaaaataataaaaatggaccgtgcatgaaaaaagattcgtgtacggtccgtttgagtttaagaaaaatagagctctttgatcttctccacaggcatctcctgcccggtccacagcttgaatgcctccgccccctggtacagcagcatatagagtccgttgaaagtcggacatccagcttctctggcaaggcgcagcagttttgtctctttcggattgtagatcacatcggaaacgatcaggtctttgtggaaaaaggacggatcgttgataatggaagcgtctgtattcggagccatgcccacagaagttccgttggtcaggatatagctgtctgcaatctctcttcgaaggatggaatcatcttcaaaatcaaacagttgtaccgtacaatttgttcgctcatttaatgtctgaacaatctgctcggcgcgcacataaaactggtcatggatactgaatacggaaatctctgacaatccgtccagtgctgcctgaaccagaatggaggtagcagctccgcctgccccgagaagtgtcatcttttttccaatcagatcgtatccggcatcctttgctgcgagcaggtatccggtaccatccgttgtatgtccggtcagaattccgttgtcattcacgacggtattgactgcctgagagatttccgcagccggagagagtcggtcacagagctcacacattttatttttatccggcatggtcagattgaagccacgtacgttcatggcgcgaagtccgtccacggcagcggccagtttgtcagttcccacatcgaatgcgaggtagacatagtcaagtcccagatgttcaaaagaagcgttgtgcatcatgggagagatgctgtgtgcaacagggcttccgagcagtcctgtcagtccggtgtgtccggtaatctgtttcataagtgggttcctcctgttttaaatttcgtctgcctgatcaaagaatgtaagatcggcagggtatacataactgtcaccgatctggtgaaggagcaccagattcagatgattgttcagatttttcttatccagtgagatggcatccataagatcactcatcggcagatgacaggtgtccggaagaccgtaggcatccaaaatcagccggatcttttgggcagtacctggctggcacaagtttttttcttcggcaagcttactgatctgatacataccgatgccgacggcttccccatggctttcccgctcatagtggaaatattgttcgatcgtgtgtgcaagcgtgtgaccgaaatttaaaagcatccgctccccggtatcgaactgatcgttttccacaacctgacgtttgatgtccacacagcggaagatgatctcaggaagaatgtcctgcaggttttcaaaagaaccacgttcttttaacgtctcaaacagggcagcgtctctgatacagccgtatttgatgacctcgcccattccatccataataaagtgttcaggaagagtgcgaagaacttgaggatcgatcagcaccagttttgggtgataaaaagctcctaccagattttttccctgcgggagatccaccgcaacctttccgccaacggaagaatccacctgtgcgagcagggaagtcggaatctgcacgaaacggatccctcttaaataactggatgcggcaaaacccgcgagatctccgatcacacctccgcccagagcaatcaccagatcactgcgggaaaacttctgctttagcagtgcattgtaaagcacggggagtgtctcaaaggctttggtaggttctccgtgtggaaggaccagctcgtgtacttcatagtcacggagggaagttttcaacttctctccgtaaagtggaaatacattgtcatcagagatgatcagaatctttttcccggaaaagcaggaggaaatataagaacctgccttgtccagaatgttgttttcaatataaatcggatagctgttgtctcctaaatgtactgtcagcttcaaaaatatccctccttgttttgcctgcttaaacttgttttccgacaacctgggcgatctggcggatctgtgtcagaagagttgtgtatttttctggtttcagagactgtgcgccgtcacagagtgcacattccggatcattgtgaacctcaatcatcagtccatctgctccggctgctacagaagcttttgccatcggctctaccagccaccatttacctccggcatggcttggatcaataataattggaaggtgtgttttcttcttcagaacagggatgctctgcagatccagtgtgtttctggtataagtttcaaaagtacggattccgcgttcgcagaggatgacattctcgtttccggctgccatgatgtactctgcggacatgatccactcttcataggtcgcgttcaggcctcgttttaaaagaattggacgatccagctgtccaagctgtttgagcaggtcaaagttctgcatattgcgggctccgatctggatcaggtcgactttttcgttgaagacatccaggtgatccggagacatcagttctgttacgatcggaagtccggtctcctctttgactgcacagagaatgtcaagtccttccagtccgagtccctggaaagaatacgggcttgttctcggtttgaaagcgccgccgcgcagcatattggctccggcagctttgacagattttgcgattccaagaacctgctcgtaggattctacagaacacggacctgcaatcagtgccagattgtctccgccgactttgacaccggatacatcaataatagaatcctccggatgaaaggcgcggttggaaagcttataaggttcctgtacatgcatgactttgtcaacggaagcgtctacttcaaaaagacgtgcatccaggcgggtcgtatctccgatacacccgatgatagtcatctcctgtccacggacaatgtgagtatccagaccgtttcgtttgatctgatgttcaactctggcaatatctttgtcagaggtatttggctttaatacgataatcataaatcgatcctccagttatttgaattaatactgtaaaattttagttgtttaaagtgtgaaactaaaaatatcataaaacaatcagggtggattgtcaatgttttccggggaattttcgattttattttgggaatggcagaaaacgtggtagaataaaaacgtgaatgagaaaaaaagaatgagagaagggacgttatgaaaacgaatgatgtgtggaaacgcgcacgtagaatacctgttatgctgatcacagaagggctctgcgtcggtcttgtcggcggatttgtcgtgctgctttaccgagtggcgctgacttttgcgggagactggcttgtaaagattctttcttatatgaaaggaaatccatttcgatgtgtggtgtggtttttgattttggcagcgcttgcatggattgtgggaaaactggtgaagtgggaaccgatgatctcaggaagcgggatccctcaggtggaaggggagatagcagggaggctttcccaaaactggaaacgcgtgctaccggcaaaatttgcaggaggctttttgtgtatgctgggtggtctttctcttggaagagaaggtccgtcgatccaacttggagccatggcaggacaggggatatccagagctttgggacggggaaaaagagaagagaagtttttgatgacttgtggggcgagtgcgggactttctgctgctttccatgcaccgctggcaggtatgatgtttgcggtagaagagatccataaaacattttcaatcccgattcttcttccggtcatgacagcttcggtgacggctgattatattgcttcccacattcttggcctagatccggtatttcgatttcagatcacgaaatatctgccgcaaaactattactggcttttgatccttttgggaattttggtaggtgtatccggtgtgttttataattgggggatgttaaaggcccaggaattgtatcgcaaaattccgtttatgaaagaaacaggccgtctgttgatcgcctttctgactgcgggagtattggggattgtgatgccgtgggtattgggaagtggttcgggcttgattgtcagcctgacacagggtgaaatggtattggggatggttgtgctgacgctggttatgaagtttttattttccgcagtcagctttggctccggagcgccgggaggaattttctttccgcttttgatattaggcgctttgatcggagcagtatttgccatggcgggggtcgaattttttggcttggctccggtgtatgtcaacaattttgtactgcttgggatgaccggattctttacagcgattgtaagagcaccgctgacggggattatcctgttatttgaaatgtccggaagtatcagtcagatgctttccctgtcgatcgtgtcggtaacggcatatattgtggcaacgctgatgcgctcagagccgatttatgacagtcttttgaagagaattctcaaagcggatactatagtgcatgacaaatgaaacaacttatggtatacttcattttagaatatgcgtatgtggcagagatgccggataccaaagagatttgaaggagccagacagatgaaaagagtattgttaaaactgagcggcgaagcacttgccggagataaaaagacaggatttgatgaggcaacctgcataggagttgcaaatcaggtgaagcagcttgtagatcagggaattcaggttgcgatcgtgacaggcggcggaaatttctggagaggccgtaccagtgagacgatcgaccgtacaaaagcagatcagatcggaatgcttgcaacggtgatgaactgtatttacgtgtctgacattttccgccatgtggggatgaagacagaagtgtttactccatttgtatgtggagcgtttacatcgttgttttccaaggatgcagcagtggaagcgctggaagaaggaaaagtgatcttttttgcaggaggaaccggacacccatatttttcaacggatacaggagctgttctgcgtgcgatcgaaatcgaggcagatgcgatgcttcttgcaaaagcaattgacggaatttatgacagcgatccgaaagtaaatccggaggcgaaaaaatatgatgagatctccattcaggaagtgatcaatcagaagctggcagcagtggatctgacagcatccattctctgccttgagaataagatgccgatgctggtatttggactgaatgaagaaaacagtattgtagagaccatgagcggtacatttaccggaacaaaagtgacagtataaggaggacaaaaacatggatgaaaaattaaaagtatatgatgacaagatgacaaaaacaatcaacaatctgggaagtgagcttgcagccatccgcgcaggacgtgccaatccacatgtattggataagctgacagtggattactatggagtgccgactccgatccagcaggcagcgaacatatccgtaccggaagcacgcatgatccagatacagccatgggaaaagagcatgttaaaagaaatcgaaaaagcaatcctgatgtctgatatcggaatcaatcctacaaacgatggaacggtggtacgcctgatgttcccggaactgacagaagagcgaagaaaagaactggtaaaagatgtgaagaaaaaaggagaggcagcaaaagttgcaatccgcaatatccgtcgtgacggaaacgatgcattcaaaaaactgaaaggaacagagatttcagaagacgggatcaaagacctggaagattcacttcagaaactgacagacaaatacattgcagaagtcgataaagcggtggaagcaaaatccaaagaagtactgacagtttaggatacagcctgtgtgacaggccaatattacgaaacagcaggaggggcagatgtgaagaagcctctcttttccatcttctggatggaaagacctgcaagaaggaggaaatacaatgaacgtaccgcagcatattgccatcatcctggacggaaacgggagatgggcaaaagccaagggaatgccgagaaattacgggcatgcacagggcagtaagaatgtagagcggatctgcgaagaagcctggagaatggggattaaatatctgaccgtgtatgcgttttccacagagaattggaaccggccggaaagtgaagtcagcgcgctgatgaaactgctgcgcaattatatgaagacctgtctgaagaccgcggcgaaaaatgatatgaaagtgcgtgtgctgggagacattgaggcgctggatgaggatatccggaccagaattttggaactggaagaagccacaaaggataacggtggcttaaactttcagatcgcgctgaattatggaagccgggatgagatgatccgcgctgtgcgccgccttgcaagagactgcgcagatggaaaggttgtgccggaaacgatcgatgagacagtgtttgagtcttatctggatacccatgggataccggatcccgatcttttgatccgtaccagtggggaactgcggctttccaattatttattgtggcagctggcatatacggaattttattttacagagattccatggccggattttacaaaagaggaattagaaaaggcaattgcgcagtataataaaagagacagaagatacggcggtgtgaaggaggaagaagatgtttaagacacgtcttttaagtgggattctcctggtggtgatcgctctgatcacagtgatcacaggaggaaatgtactgtttgcaactttgtttttgatcagtatgatcggagtctatgagttgtacagagtgtttgagattgaaaataaagcagttgggatctgcggatttttgtttgcagcaggatactatggtctgttgtatgccaaaccgctgcttccagatacaacggattggttcatgctgttatttatggcatttgtgatctgtctgatggcagtgttggtattttcttatccaaaatatcggacagagcagatgttggcagcgtttttcggagtattttatgtggcagtgatgttgtcttatatttatcagacaagaattctgccgggcggtgtctttcaggtatggctggtatttatctgtgcctggggatgtgatacctgcgcatattgtgtggggatgctgatcggcaagcataaaatggcaccgaagctgagtccgaagaagtctgtggaaggcggaatcggcggaatcgcgggagcagcgctgatcgcagttctctatgcacttgcgatcaaccactggggcaatgcaggagtcagtgtggccagctttgcaataatcggtgcagcaggcggtgcgatttcccagatcggagatctggcggcatccgcgatcaagagaaatcatgacatcaaagattacggaaagttgataccgggacacggtgggattctggacagatttgacagtattattttcacggcaccgatcattttttatctttccgtgcttctctaagaaagaaggaaaacagatatgaaaaaaatagcaatacttggttcgaccggctctatcggaacccagacactggaagtcgtaagagaaaatcgggatatcgaggtcacggcgctggcggccggaagtaatatcgggcttctggaagcgcagatccgtaagtttcatccggtgctggcagcggtgtgggacgaggcaaaagccaaagaactcagagagaatgtcaaagatctggatgtgaaggtagtatccggaatggacggactcatagaagtggcagtacagcaggatgcagaaatcctggtgacagcgatcgtaggaatgatcggaatcctgccgacgatcgagggaatcaaggcaggaaaggatatcgcactggcgaataaagagacactggtgacagcaggacacatcattatgccgctggcaaaggagtacggagtttccattcttccggtagacagtgagcacagtgccattttccagtctttgcagggagggcagcacaaggcgctgcataagatcctgctcacagcgtccggtggaccgttccgcgggaaaaagcgggaagagcttcttaatattcaggtggaagatgcgctgaagcatccaaactgggagatggggcgcaagatcacgatcgattcctccaccatggtcaataaaggactggaagtgatcgaggcaaaatggctgtttgatgtgtctgtggatcagatccaggttgtcgtgcagccacagagtatcattcattccatggttgaatatgtggacggcgcggtgatcgcacagcttggaacaccggatatgaaacttccgattcagtatgctttgtattatcccaagagacggtatcttccgggagacaggctggattttgagacactttcccagattacgtttgagcgcccggatatggagacgttctatggattgaagctggcatatgaagccggaaaaacaggcggctctcttccaacggtattcaatgcagccaacgagcgtgcggttgctatgtttttgaatcgggagattggctatctgcagattccggagatcattgccggctgtatggagatgcacaaagtgattgcagatccaaccgtagaagagattcttcagacagagcaggaaacttatgaatatatcaaaaacaggtggtagtatatgggtattattttagcaattcttctgttcagtttgatcatcatcatccatgaactgggacattttacgctggcaaagttaaacgggatccgtgtagatgaattttcattgggaatggggccgactctgtttggcaaggagtttaaaggaaccaaattcagcttaaaacttctccctctgggcggtgcctgcatgatgggagaagatgatgcagacgatacttccgaggggagctttaacagcaagtccgtgtgggcgagaatttcagtgatcgcggcaggacctttgtttaactttatcctggcgcttctgatgtcagcgattctggtgggagcagccggctatgcggttcctgtgatacaggaagtcgaatccggttcctcaggaagtgagcagggattgaaaaaaggggatgtgatcacagagatcaatggaaagaaaattcatatttatgaagagttccagctgtacaatctgacacacagtacatctgacacggcagagctgacctttgagcgcgatggaaaagaacatacgatccagatggaaaaacgacagtttggggatgagaccacaaagagaatgggatttacctattctgcagaggtggagaaaccgggatttttcaaaagtatccagtatggggcatacacggcaaaatactgggtagagtacaccctggagtgtctgaaaatgcttctgaccgggcaggtcggtgtaaaccagctctccggtccggtaggtattgtggatgttgtcaatgatacttacgatgcagcagcgccgtccggatggtcagcggtgatcttaagtatgatgaatctgggaattttaatctcagccaacttaggggtgctgaacttgcttccgatcccggcgctggacggcggacgtctggtattccttttaatcgaggcggtgagaaagaaacggattgcgccggaaaaagaaggaatggtgcattttatcggatttgcagcattgatggcattgatggtatttgtgatgtacaatgatatcatgaggttattttagataaataaggaatgagaaaaaacgtctctgcaaggtgataaggcagaggcgtttttttagatatccggctctatgttatttttttaatctgctttgcatatagttagaagaaacaggaaaaaaggaatatccatatgaatgacaatagaaatcgaagaggaactgtacagaatatccgaatgcagcaggagcacatagacaagggaaaactccagatccagattacatcacaagtgacggcttttcccatccagaatgcgcaggtttccatttcttataccggagttccggaaaatactctggaaaagctgcagacagattcatccgggcagacagaagaaatcgaactggcggcaccgcccatcgagtacagcctgaacccggaatcggatcagcagccctattccgaatatacactgaatgtggaggcggaaggatttgaaccggtgagtatctcaggggcagagattctggcagatgtgacggcgattcaaaatatttctatgcgtcctcaggttacacaggaagagccgggagaagtattcgtgattcctgcacatacgctctacggggaatatccggcgaaaattgcggaggatgagatcaaaccggtgacggagtcaggagagatcgtgctcagccgggtagtaattccggaatttgtcgttgtccatgatggttctccgcgggattccacggcaagaaattactacgtgagatatcgggattacatcaaaaatgtggcgtccagtgagatttatgccacctggccagacagtacgatccgcgcgaatgtgctggcgatcatgtcatttacattgaacagggtatacacagaatggtatcggaacaaagggtatgattttacgattacatcgtctacagcatttgatcataagtggattccggaacgaaatgtgtacgatacaatttccgcagtagtggatgagatttttgcaaactatctgtcccgtccgaatgtgcgtcagccgatcctgacacagtattgtgatggaaacagggtcagctgtccagactggatgacgcagtgggggtcaaaggagctgggagatcagggctatactccgattgagattcttcgctatttttatggaagtgatatgtatatcaacacagcagaagaaatttccggaatcccgtcttcctggccgggctacacactggaaaacggggcaagcggagcaaaggtgcgtcagcttcaggaacagctcaatgtgatcgcgggggcgtatccggcgctgccaaagattcagacggacggagtgtatggaccggcaactgcggaggcggtcagaaagtttcaggagatttttggtctgccgcagacaggaaccgtggattaccggacctggtataagatttcacaaatttatgtgggagtttccagaatcgcagaattgaattaggaatgattccgtgtgaaaaattcttgacatcgagaaaattcttttttataatcaactggtactaccagttggttataagggagaatgagaaaatgaaaatattgagacaatttgtaatcatcctgctgatttcttttttgggagaactgttaaaagctgcgctgccattacctgttccggcaagcgtgtgggggcttatccttatgctggcggcattgaaaacaggggtgctcaagctgagtcaggtttctgatgcggcagtctttttgatcgagatcatgccggtcatgtttattcctgcaggagtcggtcttttgaatgcatggggagtattgaagcccgtgtggattccaatcagtgtgatcacggtcgtgactacggtcctggtaatggcagtggctgcaaaagtgacgcaggctgtcatacagaatagcaaaaagaagaaagagaaagcagaacaggagacagtaagatgagagagtttttagtacattccgtatttttcggtgcagcagtcagtctggtcggttacgaggtggggctgcttttaaaacgaaagttcaagatggcaatttttaatccgcttttgatcgccattttgtgtgttatggcgattctgacagtaggggatatttcttatgatgattacaatcagggtgcacagtatttgagttacctgctcacgccggcaaccgtttgtctggcagttccgttatatcagcagttaaatctactgaaaaagaatttaaaagcagtagcggcgggaatcttatccggagttttgacaagtatactcagtgttcttggcctatcttatttattcgggctttctcatgatatgtatgtgacactgcttccgaaatcaattacaacagcaattggaatgggagtgtcggaagaacttgggggaattgttacgatcaccgttgcagtgatcatcattaccggagtactgggaaatataatcgcagatgtggtgtaccgggtatttcggatcaaagaaccagtggcaaaagggctggcactgggaaccgcttcccatgcaattggaactgcaaaagccatggagatggggccggtagaaggagctatgagtagtttggctattgcagtggcaggacttttaacggtgatttttgcatctgtttttgcaggatgtttataagggggtaaaatatatgagacatattatcattaccattgggagacaatccggaagcggtggaagaaaaatcggagaacgtctggcagagaaacttggaattccatgctatggaaaatcggaacttcaaaagattgcagaaggtacggatgattatgaagaggtgcagtcattttatgaggaagagccggtaaacagtttattatatgccattgctatgagccagtttgaacaggaggtcggacggattccgtttcgaagaatccgggagctggcatcgaaagagtcctgcattataataggaagatgcgcaggccatattttcagagaagatccggaagcagtccgtgtctttatccatgcagaccccaagatccgtgtgcagagaatcatggagcgggaaggactttccgagacaaaggcaaagaaatttctggaggatacagacagcagacgagcttctttccataaatattatacaaagcaggagtggggactggcacaggattacgaactgtgtctggacagcggcgttttggggatcgaaggtacagttgaggtattgacagaatatttaagattcagaggttttttagggaatgaatgagaaaacatatgagagagtgatcgaatatctgaaacagcagatacaagaaggaaaactttcctgcggaagcaagatcccatctgagcgggagctggcggcaagtctgaatctgggacgaaattctgtccgggaggcgcttcgcacaatggaacataccggaatgctggagagcagacagggcaaaggaaattttctggtgaatatgccgcagaaaagtctgggaaatgtgttttccatgatgctgctcaccggacagagcaactacagggaagtcagccgaatccggcgaatcctggagcaggaggcatttgtacaggcagtgcggttgaaaaatccggaagttttaaagaggctgaaagcagaaatcaaagagatgcagataccggaaaagaccgcagagcatgaccgaagattccatcaggagctgatccgtgcaggagagaatcaattgcttgtcgcagtgatggaatctttgtccggtctttgtgaagaagaaatcgcacatgtacaaaacgaagcaaaaaatgaggactggtgccagatccatgaagaaattgtaaatgccctggaagaaggaaatatggaaaaagggctgaaatggattcgcaggcattacgataaaattgatgacactttaattttctaaaaacaggttgaaatattcccgggtatgtagtataatctttacaatttgagaaaatttacgaagggataaggtgaacagatgaaggcatttctgattttagaagatggaaccgtgtttacaggaacaagcattggttcgacaagagatatgattagtgaaatcgtgtttaatacctccatgacaggatatttagaggtgttgacagacccttcttatgcgggacaggcagtcgtaatgacgtatccgttgattgggaattatggaatcacaccggacatggaatcaagaaaagcatggccggatggttatattgtaagagagctgtctcgtatgccaagcaatttcagatgtgaaggtacgattcaggactttttgaaagagcaggatattcctggaatcgcaggcgtggacacacgtgctctgacaaagattttacgggaaaaaggtaccatgaatggtatgattactacaaatgaaaattacaatctggaagagattcttccaaagctgaaggcctacacagtaggtgatgttgtttctaaagtaacatgcagcgagaaatatgttctggaaggaacaggaaagaaagtagcactgctggatttaggagcaaaaaataatattgccaaatctttaaatcagcgtggttgcgaagtgactgtatacccggcccacacaactgcagaagagatcatttcatcgaatcctgacggaatcatgttgtcaaacggccctggagacccggcagactgcacctctattattgaagaaatcaaaaaattgtacaatacagatattccgatctttgcaatttgccttggacatcagctcatggctcttgctacaggtgcgactacacacaagttaaaatatggacatcgcggcggaaatcatccggtgaaagaccttcagacaaatcgtgtatacatttcttcccagaaccacggctatgtggtagatgcagaaaatgtagatccaaatgtggcagtgcctgcatttacgaatgtcaacgatggaacaaacgagggacttgcctatgtcggaaagaacatctttaccgtacagttccatccggaagcatgcccgggaccacaggattccggttacctgtttgacagattcattgagatgatgggaggagcgaaataatgccaagagacagtcgtattaaaaaagtattagtaattgggtccggtccgatcatcatcggacaggcagcagagtttgactatgcaggaacacaggcatgccgttctttgaaagaagaggggattgaagttgttctgttaaactccaacccggcgacgatcatgacagataaagatatcgcagataaagtatatatcgagccattgacagtagaagttgtggaacagctgattttaaaagagcagccggacagcgtacttccgacactgggaggacaggccggtctgaacctggcaatggaactggaagaggcaggatttttaagaaaacacaatgtccgcctgatcggtacaacttctgagacgatcaaaaaggcagaggatcgtctggaatttaaagcaacgatggaaaagatcggagaaccggttgcagcttctctggtcgtagaaaacgtagaagatggtcttgcatttgcgaataagatcggatatccggttgtacttcgtccggcatacacactgggaggaagcggcggcggtatcgcacatgattctgaacagctggtggagatcctggaaaacggacttcgtctttcccgtgtaggacaggttctggtagagcgttgtattgcaggatggaaagagattgagtacgaagtaatgcgtgacggaaacggaaactgcattacggtatgtaatatggaaaatattgacccggttggtgtgcatacaggagacagtatcgttgtggcaccgtcacagacgttgggggacaaagaataccagatgctgcgtacttccgctttaaatattatcagtgagctgaatatcacgggtggatgtaacgtacagtatgctctgcacccggagacatttgaatactgtgtaatcgaggtaaacccgcgtgtaagccgttcttctgcactggcttccaaagcgacaggatatccgatcgcgaaggttgcagcaaagattgcccttggttatacactggatgagatcaaaaacgcgattacacagaagacatatgcaagctttgagccaatgctggactactgcgtggtaaaacttccgagacttccatttgataagtttatcagtgcgaagagaacactgacaacacagatgaaagcgaccggagaggtgatgagtatctgcgataactttgaaggtgcgttgatgaaagccatccgctctctggagcagcatgtagacagcctcatgtcttatgatttcacagatctgtctgtggaagaactgacagagcagctggagatcgtggatgatatgcgtatgtggagaatcgcagaagcaatccgccgcggtgtaagctacgaaaaaattcacgagatcacacagatcgatgagtggttcattgataaatttgcaatcattgtggagatggaaaatgcactgaaatcagaagagctgacaccggagttgttaaaagaagcaaaacggatggagttcccggataacgtgatcgcacagttgacaggaaagacagagcgtgagattcacgatatgcgtcatgcaaacggcattgttgcagcatacaagatcgtagatacgtgtgcagcagaatttgcagcagagacaccatactactattctgtatatggaagtgagaacgaagtagaagagactcgtgataagaaaaaagttctggtacttggatccggtccgatccgtatcggtcagggaatcgagtttgatttctgttctgtgcactgtacatgggcatttgcaaaagaaggttacgagacaattatcgtgaacaacaatccggagacggtaagtacagactttgacattgcagacaagctgtattttgagccattgactccagaagatgtagagagcattgtggatatcgaaaaaccagacggtgcagtcgtacagtttggtggacagacagcgatcaagctgactgaagctctgatgaagatgggagttccgatccttggaacttctgcagagaatgtagacaaagcagaagaccgtgaattattcgatgagatcctggaagagtgcgagattccacgtccgacaggaggaacggtgtttactgcagaagaagccaaagaagttgcaaacagacttggatatccggttctggtaagaccttcttacgtattgggtggacagggaatgcagattgcgatcaatgacaatgatatcgatgaatttatcggaatcatcaacagaatcgcacaggatcatccgattctggtggataaatatttacagggaaaagaaatcgaggtcgatgcagtttgtgacggcgaagacattctgattcctggaatcatggaacacattgagcgtgcaggaatccattccggagacagtatctctgtatatccggcacagagcctgacgcagaaagcaaaagacaagattgcagagtatacaagaagacttgcaaaatctctccatgtcatcggtctgatcaatattcagttcatcgtatgtggagaagatgatgtgtatgtcattgaagtaaatcctcgttccagccgtacggttccttatatcagtaaagtaactggaattccgatcgtaccgcttgcatccaaagtgatcatcggaaacaagatcaaagaactgggatacacaccgggactgcagccggaagcagattacgtggcagtgaagatgccggtattctcctttgagaagatccgcggtgcagacatcagccttggacctgaaatgaaatccacaggagaatgtctgggaattgccaagacatttgacgaggcactttataaagcattccttggagcaggaatcaaactgccgaagttcaagaacatgatcatgacagttcgtgacgaagacaaaccggaggcagtggagatcggacgcagattcgaaaagattggataccgtatctttgctacaaagagcacggcagaagcgctgaacgcagcaggcgtgaaagcaattccggtccgcaagatcgagcaggagtcgccaaaccttctggatctcattttaggacacgagatcgatctggtcatcgacattccggcgcagggggcagagcactccagagacggatttgtcatccgaagaaacgctattgagacgggggtcaatgtactgacagcgatcgataccgctgaggcgctgatcaccagtcttgaaaatacagatattaaaaaactgacactgatcgatattgcgacagtacagtagacaaaagatggtcgggacgaaagttccgatcattttttgttataaaatagaacccaacatttggatatgtttttccaacattacagtctggcagtccccctcgaaatctttataataaaaaatagaaacaggagaggagaaccagaaatatgagcatttgttatcacgaaggatcccgggaatttcatctttacaacaaagaaatcagctatctgatcaccatcttaaaaaatggacagttaggacagctgtattttgggaaaaagctgcatgacagggagagtttttcccatctgctggagctgcgtcaccgcccaatggctgtatgtacttacgaaggggattccacattctcgatggaacatatcaagcaggaatatccgtcctatggagcaggggatatgcggtatccggcggtggagattctgcaggagaatggaagccgtatcacgaattttgtgtatcagacacatcggatttatgacgggaagcccgcgcttgcaggactgccggctacctataccgaagattccaaagaggcacagacactggaaatcgaactgaaagatgagctgatccacaccacactgatcttgtactatacgatttttgaagagcttccggtgattacaagaagtgcaaaggtgatttaccacggagcagagaagatcgtgctggagagggcaatgagctgcagtgtggatctgcccgatcacgactatcaaatgatcgaactgaccggagcctggggaagagagcgtgcggtgactgagcgaaagctgcagtatggaattcagggaatttacagtatgcgcggatgcagcagcagtaactttaatccgtttctggcactgcggcgggagaataccacggaagcgtgcggggaagtgtatggcttcagtcttgtttacagcgggaattttctggcgcaggcagaggtggatacatacgatgtcacaagagtgacgctgggaattcatccggaccggttttcctgggagatgaaaaacggagatgagtttcagacaccggaggcggtgatggtctattccgatcgcggactgaacgggatgagtcaggcattccacagtctgtatcgtgcacgcctggcaagaggatactggagagaccgaccgagaccgattctcatcaataactgggaagcgacttattttgatttcgatgagcaaaagatccttcagatcgtacgcacggcgaaacggcttggaatcgaattgtttgtactggatgacggatggttcggaaaacgggaggatgatcattcttctctgggagactggtatccgaatctggaaaagctgccggatggcattgcaggaatcgcgaagaaggtagcggcagaaggcatgaaattcggtctctggtttgagccggaaatggtcaacaaggacagcaatctttatagagagcatccggactggatcttgtctactccgggacgtcatatttcccatggaagaaatcagtatattctggatttttccagagccgaagtggtggatgccatttatggacaaatggaaaaaatcctggaggatgcgccgatttcttatatcaaatgggatatgaaccgctgtatgtcagaagtatactcccatacagccagtgccgcagatcagggtaaggtcatgcatcagtatattctgggtgtttatcggttatatgagaagctgactgccagattccctgaaattttgtttgaatcctgtgcaagcggcggttcccgttttgatccggggttgctgtattatgcgccgcaggcatggacatcggatgatacggatgcagtggaacgttgtaagattcagtatggaacgtcccttgtctatccggtgagcagtatgggatctcacgtatcagcagtgccgaatcatcaggtgcttcgcaacacatctttgaaaatgcgtgcggatgtagcgtattttggaaccttcggatatgagctgaacccgaacagtctgacagaggcagagcgggaggcaatcaaaaaacagacggcatttatgaaagaacacagaagcctgatccagtatggaacattctatcgacttcagagcccgtttgcaggaaatgaaatggcatggatggttgtgtctgaggacaaaaaagaagcgattgtgggatggtatcgcttcctggagccgatcaatatcggatatcggagcgtcagactgcagggactggatccgaagcttccgtatcagatttcgaatatggaaatggcattgtacggagatgagctgatgcaggccggactgatcgtatcagacgtggcgtccggacaaaatccggagcagtataatggagagaacggagatttccagtctcgtctttatctgctgaaagcaaaggaagaataaaaatgaaggggtggggatgcaaaagaattgattttttcatccccctcttttttgcttccgatactcagaaggacttagaccgtttactttacggaatgccttggaaaaagaaaagctgctggaatatccgcaggaataggcaatattctggatggacaggctgcttgactggagcagctcttcggattttgtaatccggtaccgagtgaggaactgctgcggggaaagctgtacggtttttagaaacagttccgtcagataactccggttcaaagacaaatagtccgcgatttcctgtacagtgagtggattctgataatttttatggatgtaggagatcgcctgattaatatatacgctggatgtattctgctgaggagaaaccgtacatccggcgtcctccaccagaagggcgagaaactgcatcagaattccctggatgtaaatctcatttgcggcacttaaggcgtgatgcttcatcatgtccaggatataggattttgcggtatcgatctgggtacaggaaaaaatcggatttctggcagaaagaccggcaagccgcagatatttttctgcatcatgaccgccgataccgacccagagatagctccagggattcactgaatccgcctgataaaaagtcagcttgccgggatgaatgagaaacccctgcccctgtttgatcggatagcgttcttcaccggagtaaaatacgccttctccttccagacagagatgaagcaggtagcagtcccggactgccggcccgaaggaataggaaggggggcagtcctgcattccgcaaaagacagtgtaaatgtctgagaagatactgtgataaatgtcggattgtgaataagaggacataggggactcctttcgtgtgaatgtctgtgatattttatcatgtttcgatatctctgacaacttatatacccatttgaaccatgaaaaagcacgaatcataatagagatgaaagctaaagagcagagattttttattgcgcagtttttgcggggggtataatataataggagaaattgcagattacggtttaaaatcaagaaggaatgagggaaaatatgaacacaatcatagaaatgaaccacgtgacaaaagcataccgcaggaaaatcaaaagcgggaaaggaatcttcaaaagcagtaaattcgagaccaaagaagcaatcaaagatatctcatttcagatcaaagaaggagagatggtcggaattgtaggactaaacggtgcaggaaaatccacattgatcaaatccatgctgggaattctttctccggacagcggggaagcgaaaatgttcggaagggacagttttcagttccgcaagaaaaatgcagaatatatcggggcgaatttcggacagaaaagttcccttgtatgggatctgccctttatttactctctggagttaaacaagaaaatataccgggtatcggacgaacggtatgaggaaattttagaagaactggaacagtttttgcagattggggaactgttaaacgtaccggtacggacgatgagcctgggacagagaatgaaatgtgaatttgccgtgatcacattgcattcccccagattgctgattctggatgagacaacgatcggacttgatattgtgatcaagaagaatatagaagaatatctgaaacatatcaatgctgcaaggaatgtgacgattcttttttcctcccatgatcttgcagagctggagaggatctgtgaccggatcatgatcatcaacagtggtgagatcatactggatgatcaggtgaaaaatatttcggatctgtccagatacagctatatgatgatcaagtttgcagaagcctttgacgggaatgtggaattaaatccgggcttacagattgtggagtatctggaggacggattgaaaatacggatcgataaacagagactttcggaaaaagaagcaatgacagagctgattgataaaatgccggttgaaaatatctcaatcgaaaaacagagtctggaagattttatttacaatcttgtacaaaaataaatacgaaaggcgaaaaacgatgaaaaaatatattgcattgatcagagttggaatacaaagagaactggtctaccgtactaatttttgtatcggtatcttttccacggttcttttatttgttgtagaagttgcaatctggtcagctgtgtatcaggggaaagaggaagtgggaagtatttcttataacagtatcatgatctacacagtgatgacattgctgcttcagcgattattgggcggcggaacagatgaggagatcgggaacgattttcaaagcggaaatatcgttacatccctgctgacgccgttaaatctgggagtcaaatattccatgcaggagttggggaaaggattacttaatgcctttgtgctgcttttggttttcattccgtactgtataaaaaacagagaaatagtgtctgtgataccgatacaaagatggctgctctttgtgccggcggttgttttttcttatattctgttcagtattttaaattatatgctgggaattttgacattctggagtcactcaaacatcgggctttatatgctgaaaatggcctgtgtcaatattttcagcggaatgttcattccgcttacattttacccatcgattctaaggggattttgtatggtgcttccgtttcagtctatttactattttccgttgaccattgtaatgggagaagcaaacggggcacagattgccggaggaatcctgcttcagttgggctggatcgcgggattgtttctgctgtgcaggctgatgaacaagaatgcaatgagacggatcgtgattcagggagggtgagaaaatcatgtcatatacacgtaaaatgatagaaaaggttcgatggtatctggattgctatcgaatgtattttaagatcaatctgctgactgtattggaatacaaactggattttctggcgatcaatcttgccagcgtcctggcacttttggtcggtgtgtttaatatcgagatcattttcagtcaggtcgatgcgatgaaaatgtggagtaaagaagaagtgctgtggtgcctgggatttttctatctggtcagagccatatacaatacgttttttatcaatacattgagcatcagttactggatccagaacggaaaatttgatctttttattttaaaaccgctcaatacatttttccagcttttgagtaccggaagatacaatgcggaatatcctctggatgagtatctggtcggaatttttctgctgatccggacaagtcataaactgcatatgtttcacggatggcagagcatcgtactgtttgtatttttactggttacggcggtgtttgcgtatttcagcattatttttattatgtcaaccttatccttttggttcattaagtctaatatgtttatcacgctgatcgaaaatctggagcggctgatcgaatatccgatcgacatttaccatgccgtgatccgggtagccgtcagtgcgctgattccgatcgctctggcgaattattatccgacagtctgcatgctgggagagggcagcagcgggattttgctgtatatagcaggtgcctgtgtcatattgggggtcattgacgttctggtgtggaagaaagggatgaaagcgtatcagagtaccggggcataaagataaaccaaaaccttcttgcggcgggaataaaaattacatataatagaagtaattgataaaaagaggcgttcgatggcagaaaaagagacatggaggaatcagatatgagttttcaaatttacaattggctggaaaaatatgtgcatgaagtggtaagtacatttggataccgcatctggtttatcggggtacagggcagttatgccagaggggaagccacagaagagagtgatattgatgtggttctgattctggatacgcttcttccggcagatctgaggatctacagagggatgctcaatcgtcttccgtaccgggaaaagatctgcggatttatttccggccgagaagagctggagaactggtctaaagcagatctttttcagttttgtcaggacacgatgccgctgaaaggaagtctggatgagatcgtggcaaagctggatatggcagacgtgagacgggcggttcatacgggagcctgcaatctgtatcatgccgcctgtcacaatatgctccatgagcagagtcgggaagttctgatggaattatataagacatcggtatttacaatccaggcggaatattttttaaagaccgggaattatctgagaagaaaagccgagctgtttccgaagctgaacggactggatcgggagattttgtatattgcgatcgagatgaagcagaaaagcggaaaagtgaaaggcagttttgatgagctttctgaaaagctgatcgtgtggtccagcggactgatcagacaatatcagggagaaaaatgaatgaatacatataaattgcttcaaaaataggcgcgttccaatgaaaatatgcgggaaaatgcagaaaattgcaagaaaggattgacgaaacatcaaaaagtcgatagaataacaaccagtgataaaagaattggaggaatcttgcaatggcggcgtataaggatttgacgaaggaagaattattggaattaaaaagcgggcttcaggctcagtttgaagaggtaaaagccagagggctgaaactggatatgtccagaggaaaaccggcagcagcacagctgaatctgtctatggagatgatgaacattttaaacagtggaacagatcttgtctgtgaagacggtgtggactgcagaaattatggtggcctggatggaatcgcagaggcaaaacagcttctggcagatatgatggaagtaccaaaagacaacgtgatcgtattcggaaattccagtctgaatgtgatgtatgatacagtagcccgtgcgatgacacacggaatcatgggaagtactccatggtgcaagctggataaagtgaaatttttatgtccggttccgggatatgacagacattttgcaatcacagaacattttggaattgagatgatcaatgttccgatgacagcaacaggtccggatatggatctggtggaaaaactggtcagtgaagatccggcgatcaaaggtatctggtgtgtaccgaagtattccaatccacagggaatcacatattctgacgagacagtgtatcgttttgcaaacttaaagccggcagcagaggatttccgtatcttctgggataatgcatattgtgtacatcatctgtacgaagacaaacaggattacctgctcgagattctgatggaatgtaaaaaagcaggaaaccaggatatggtatacaagttttcttctacctccaagatcagtttcccgggttccggtatcgcagcaatcgcggcttctgatgcgaaccttgcagacatccgcaatatgatgaaagtgcagacgatcggccatgacaaagtaaatcagcttcgccatgtcagattcttcaaagatattcatggaatcgtcgagcacatgaaaaaacatgcagatatcatgagaccaaaatttgagacggttatcaacacattagagcgtgaactgggaggactcgagattggttcgtggatcgctccgcgtggcggatactttatctcctttgatgccatggaaggatgtgccaaagcaatcgttgcaaaagcgaaagaagcagggcttgtgatgacaggcgccggagcaacattcccatatggaaaagatccaaaagacagcaacattcgtattgctccgtcttatccgacaccggaagagctggcagttgcagctgagatttttgtactcagtgtaaaactggtcagcatcgataaattgctgaaaaatttataagattgtttcatgaaaaaggacaactgactttgagtacagccctcaaaatcagttgtccttttttgtgtggtcatgcgttatttctctgtttttacggcatgttttttcggcagcgtgaatccatttccatgcacttcatttacctttccgatgatcataaatgcagtagggtcgatttccataacgagctgattgagttttgaaagctcccggttggaaatgacggtcaggatcatattttgtctggaatgaagatatccggtttctgtatgaagcagcgtagatccccgatccatcttcctcgtaatggcttcattgatttcatcggatttctggctgatgatcttgacctgcgtctgagcctggccgatgacaagaattttatccagtacaatggtgtaggtcatgacaagaagaattccgtacagaatggcctctttgtcacagaataatgcctgaccgatcaggatcaaaaagtcaaatacatagagcattacagaaacaggcagtccgaattttttgttcaggatcaacggagggatatccatgcctccggtagaagctccgcaccgtatgacgattcccagtgaaaatccgataaagagtcctccgaagatgctggataacatccggtcatccgtgattgtggaaagcgaagggatattttggaaaaatccaagtgcaatcggatagtaaaaggtactgatcagtgtggtcagggcaaaatcaaatcccagtatcagcgcaccgagtaaaaacatgatgcagttgaagataaacacaaagacagaaatcggcagatgcagataatgatctatgatcagagaaagtccggtggttcctccggtcatcagctcgttgggaagaacaaacatgacgattcccagtgccatggtggtgttgccaaggaaaatcatgaaaagattttttggcctaaaaatattggttttcatggttttgacactctcctttgaaataattatgcgttaagttactatggtaaagcgaaaaaaaacaggctgcacatcagcctgtctgttgattatatgaaattgaaaaagatgttctgtcagatcttttcatttgcgttcgcttccttttttgatttccgaaaaacagtatagcataatttcagggaaaagtacaagaagaaagtgtgaacaatacggagaaaaagacataatataaggaaaaaaggatgtgcgtaaaatggcatatgagacatatggacaaataaacggtgtgataagggagattcaaagaggggattcctgctgcagccagattctgcgtctggatacagaaaacggagaagtacgctttaccgtgatggcggatacaatggtgatcgaaaatgtaaggctgcgaagaggaatgcgggttgccgcgttttatgataccagccttccggttccggcaatttatcctcctcaataccgggcagagattgtgacagtgcttcggggagaacagaatgtgatgctgaatttctttgatgaaaatctggtggcagaagataattcacttcggttaaatctcagtcctgtgacaaatatcatgacacagaacgggcagagatttacctgcagtccgagaaacatggagttgttagtctattataccaatacgacattcagcataccgccgatgacaacgccccagaaagtgatcgtaatgtgcgagatgtagaaagataagaatttgttattggagaaatcgatcataagctggtctcttttccgggaatgcagtataataaaaacagagcaaaaggggggatgatgtgaatatcaatttaaaacagttggaggcgttttgcgcactggtgcgctcggtgcggcagtgatcggatggcagaaaatgaaagggaggcagaagaaaagatgagtgacaaagaagagattgtgttttgtaaaggcgggggctgcacggcaaaactgggcccgggaatcctggcaagagttctggaaaagataccaaagacgagggacgaaaacctgatgatcggatatgacagttcagacgatgcagcagtgtacaaactgacagatgatctggcagtggtgcagacgctggacttttttcctcccatggtggatgatccctacacattcggacagatcgcggcagcaaatgcattaagtgacatttatgccatgggcggagatgtcaaaaccgcattgaatattgtctgctttccggaaaactgggatttgaacatactggggcagattatgctgggtggcggagaaaaagtcaaagaggcgggcggtgttctggcaggcggacattcgatcgcggatacagacgtcaaatacggactttctgtaatgggaaccatacacccggacaaggtgtttgcaaacaatggatgccgggcgggggatgttctgatcctgacaaaaccacttggagttggaatcgtgtgtactgcaaaccggatccaggaagcatccgaagaagcaatggcgcaggcaatccgttccatgaccaccctgaacaagtatgcctcagaagtagtgagaaagtatcaggtgcacggctgtaccgatgtgactggatttggttttctgggacatctcctggagatgctgggagatgcatattctgcccgcgtcgaaagcagtcaggttccatatattccggaggcgtttgattatgcaggggaattttacctgactgcagcagcccagagaaacagaaaccatgtgggagaagacgtgcagttttttgaggttccgtttgaaatggaagagattttatttgatccgcagacatccggagggctgcttgtcagcatagaaaaaagtgatgcggagcagtgtctggaagagttgaaggctctgggactgccctgtgcgattgtgggagaagtcacagaaaaaagagagaaaaaaatagaagtgagatagaggtgcagagaacatgaaaaaatatatggtagatgcaagaggaaaacagtgtccgattccggtagtggagacgaaaaaaatgctggcacagatggcagaatcagatatcgtagagacactggtggacaatgccattgccgtgcagaatctggagaaaatggcaaaacaaaaacagctggaatgttcctgggaacaacaggatgaacatacatatcgggtttttataaaggcagaaggcgctgtggatgaagcgggggaagagactgcagaatgtatcccgtgtcagccggtctccgaaaaaacaggaaatacaatcgttgtgttatcttctgactgcatgggagagggggatgaagttcttggaagggcactgatgaaaggctttatttatgcgctcacgagtcaggaagagcttccggatacagtcatcatgtataatagaggcgccagacttccggtagaaggctccgaatccctcgaagatctgaagcttttggaatcgcagggagtggagattttgacttgtggaacatgtctgaatcactacggactgacggagaagctttctgtgggaagtgttacaaatatgtatgtgatctgtgaaaaaatgctgcaggcagaaaaggttgtgaagccatgatttatctggacagcgcggcaaccagctactatcgtccgagagaagtggcgcaggcagtgtatgatgcgatcctgaccatgggaaatgcaggcagaggaagccatacatccagtctgaacagtgcccgcatgatctatgagacaaggtgtctgctgaatgaattatttcacggaccgggaccggagcaggtggtgtttaccagtaatgctacggaagctcttaatattgcaattcaggggctgacagctcccggggtgcggatggcagcgacagcaatggatcacaacagtgtcttacgccccgtgtatctggcaaaagagagagggtgcagcctgcagatcctggatgtggatgagaaggggcggctttccctggaaaagctggaagaattgtttcaaaatggtgtcgatatctttgcctgtacccatgcatccaatgtgacaggaaacttaaatccactgacagaaatcggaaaactgtgcaaaaaatacggcgtgttgtttctattggatgcgtctcagacagcaggagtatttccaatcgatatggaacgagattttattgatatcctctgctttaccggacataagggcctgatgggaccacagggaacaggggggatgatcgtacaaaaatctgtacacctgcctgcgtttaaaaccgggggaagtggagtgcagagttttctgaaaacacagccccaaaagatgccgactgtactggaggcggggacgttaaacgggcatgggattgcaggattacatgcagcattaaactacattttgaatgtcggaacagaacagatcaaaaggatcgaatgtcagagaatgctgcagttttatgaggggatcaaacatctggatgccgtaaaaatctatggagatttttcaagtatggaacgggcgccgatcgtcgctttgaatatcggaaattatgactcttctgcagtcagcgatgagctttccgaggtgtacgggattcagacgcgtcctggggcacactgcgcacccctgatgcacagggcacttcatacagaggaacagggaatcgtacgatttagtttttctcattttctcagtgaagaacaggtggaggaagcggtacaggcaatcaaagaaatgacagcaggagaagagatatgagaccaaaagaattacgtatcatagtgacatttgaaacgacaacagctgcgatggcatttgaaagcgaggcaaaaaagcggcagatcgggggaagactgatcccagttccaagggagatcacatctggatgcggactgagcttttcagcaccgatagaagagaaagaacagatttacaatctgatacagcagctgcagtaccaacaggtgctggaactgataatataaaagaagagaagcagttcaggtatgatcctgatcgcttctcttcttttttgtttattcttccggaggtgttacggtaccggaatctccattgctgtttccgttattatttccgttgttgtttccattgtttccggaattgttgttgttatcaccggactgatcggaatttccggaatcctcattatcttcggaatcctggctgttctgagaattggaatcctctttgttcttatcgtcatcatcctcgtcatcctcttcttcctcatagtggccggagcagctctgcgtcggaccggttccttttgcgaaatattccgtgtaggacggacaactgctgaccgccagaagaccagtgacagaacatactgttttctgctctacagatgcaggcatggtaaagttctttacctgaagaccgagtgtagtgttgacacggtccatgatatttttccacatgacttcgtgccaggtctgattatagatattctccattggtttattggaatcatatccaccccagacagagcatgtatagtacggtgtgtaagcagcaagccagaggtcagtactgtattcggaagtaccggtttttccggatgcaggcattccatttgcaagctgtgcagctgtaccggtaccacgtttgatcacatcctgcatagcattcgtcagaagtgctgctgtggaatcctttacaacctgatgagtctcaggagtactgttgtccagaatgacattgccgtcatgatccaaaacctttgtatataagatcggttttgtgtacactccattgttggccagtgcagcataggcagcagtcagttcaatgttataaacaccgtttgtgataccgccgagtgcagtggactggttgtaatcgttgtgtgccggatcatcttctttgcttaccagtgtagtaaatccaaagttctcaagatatttcatacctgtatcgataccgatatcagtcagagtacgtaccgcacaaacgttcatggagtggaggattgcatagcggacagtagcctgtccaatatatttgccatcccagttgttgaccggagttccgtcgctgtatgtgtacggagagtcttcgatcagagaagccagagtatattttccggtatcgatcgccggagcataaacacccagcggtttgaaacaggaacctggctgccggtaagaatcggtcgcacggttcagagaaaagctggctgttttttcccctcggccaccgacaatggctttgacttctcccgtatactgatccatcaaaacaacagaagtctgaggctgtggagggattgtaatactttcgtctacagtatccccttcctggatattaagtgttgtcttatattcagcaactgcctgattggcttcatccggggaagagaagacaagtggatattcacgtccccatgctgcctgaatataatctcctacattgttctggctgtagttttcaacagaaccgtcagcacgtgtaacagtcagtgcatattgcagtccgtattcgatggtagatggatagttgctcggatcggcaacctcttcatcgcagatctgctggatcgtcggatcctgtgtcgcataaatcgtcagaccgccgctgtacagcagattatgtgcctgtgttgcagtgtaagatttacgctcctgcaaatcgtttaatatctgttctgcaagctcatcgataaaatatgtgttcggtttttccgcatcagagccgactgcagtaggctggatcctgtcatagacagggtctgccttggcctcatcaaattcctgctgggtgatgtagccctgttccagcatgttgttcagtacaatgtcccgtcgtttggcgttctcctccggatgagtcacaggatcgtatcttgtcgggttctgggtgatcccggcgatgactgcacactccgaaagtgtaagctctgagacatctttgttaaagtagcgctttgcggcagactgaacaccgagacagttctgtcccaggttgatggtgttcatgtaggcttccagaatctcttctttggtcatctgcttttcaatttccagggcaagatactgctcctgcagttttcgctccagactgtcgaaaaacgttttttcattcgtgaaattcgggaacacgttatttttgatcagctgctgggtgagcgtactggctccttctgaaaagtctccgcttgtgatacctacaagaccggcgcgcaggataccctgcaggtcgattccgttgtgctcgtagaaacgctcgtcttcaatcgctacaaatgcattggcaagatattttggaattgtgtcaatggtcttgtagacacggttggatccggcttctcggaactgccccagattctgaccgttagatgccgcaaccacctgggatttatatccgcttggtttgactttggcaggagtgatctctggcgcatcgtcaatgatcttcttgacgaaaagaccgccgcctacggcaccgatgatgcagatgagaaggaaacagatgacaacggccttaaagacacggacgccgacccgtttctttttcatatttttctttgaagatacattttttttcttcttcgaaaggctttcttttccgtaattcatgaataatatcctcctttattcattctattcattatatcaaatttgctcttttaaagcaaaggaaaaagaaaaagttcatattcttataaaaaaaatttaagaattgcacagtttttcttgtgtttgttccaaaggcatagtatatataattaagaaagaacaggcagaaaaaacctgaaacaaacaaaaggcatggaaaaagcaaggtgggagacagatggaatacaggacagtatatcagggcggcaagggcgagatcgtggaaaaaaagtcccggtttatcgcggaagtatttttggtgcactcggaggaggaagccatgcagtatctggaacagatacggaaaaagtactgggatgcaaggcatcactgctgggcctatgtaatcggagaagaacgcgtgacagagcgctgcagtgatgatggggaaccgagcggtacagcgggcaaaccgattctggaggtcatccggggagcgggccttcacaatatttttgtagttgtgacacggtattttggcgggacacttctcggaacgggaggcttggtgagagcgtataccgaatcagcaagagaagggatttcccacagtcagattattaccaaaatctatggatttaaactgaatcttacaacagattataccggattggggaaaattcagtatctgctgggacaaagagggctgacaatcctggacagtgtgtatacagagaaagtagatctgactgtcctgattccgaaagaggaggagtcaaagctgatcgctgagatcacagaagcgacaaatggtcagaccggaatagccagaacaggagagtgctggtttgccaacgtagatggtgagatggtcgtatttgaataagtgacaataaaaaagctgccggttgaggcagcttttttatcttatgaaaattctggctcgatcagtccgaaggaaccatcttttcttttgtagacaacattgacttcgtctgtctctgcgttgcagaatacgaagaaagcatgtccaagaagatccatctggatgcaggcatcctccggatacattggtttgatgccaaagcgttttgtacggacaatgcggatctcatcatctacagaagtgtcatcttctgattcgaaaaattcttttttaaagttattgccggaaccggaagcggtaggatgtccctggcttctggcaaccagtttgtttttatatttgcgaagctgtctttcaataacctcttctacaagatcaacggatacatacatatcatcgctggtctgctcagagcggataatgtttccttttacaggaatggtcacttcaatcttctgacgttctttttccacactgagtgttacgataatttctgtttcaggagtgaaatacctttcaagttttcctaatttctgttcaatagcgtcctttaaacctggtgtcacatcgatgttttttccactaataataaagttcatactggtcaactccttttgtttatattgtacaaagaacttgtccttataaagtgttctttgtactatgtaaacattatagcacggaattcctctattgtatagaacgaattacttcaattcgggtaatttttccatcggtgatcttaacgatgcgcagaccgaaatcagaaaagtaagtgcaggcaccgactccgatctcaatttcatcttccttcatcttctttaacagcacatccagcagtgtctcatcattcttataaggaatgtggacatggatcagacgattgatatatttgactttctgagaggaacggaaaataatcttttcggactcatcaaaagtcataaacaaaaattttcttgtggcaaataaaattgcaatggcgatcacgccgatcagactgttgagcggtgatccatgatcgatgatgatctgtcttgcgatggcaaagagcagaacctcaaatactgtgatcggggtgtggagatacagcatacgtatcatttccacaccgatgatcaggttaaaacaggtagtcagcatatcgtcataatttggatactgattcaggtctgacaaatgctgaaatgagaggatcagctgaaaggtcatgatgataattgtaactgcaaggatcaaagcgatgacaacttccaggattgaagtgatccatttcaaaaaggcattggcatattttttcatggttgtctcctgattatttcaaattgctgcgtttacgcattctggaatccaagatttttttgcggatacgcagggtttccggtgttacctccagaagctcatcggtatcgataaagtccagtgcttcttccaggctcaaaatacgaggcggtgtcaggcggagcgcttcgtctgcactggaggaacgggtgttggtcagatgctttgtcttgcagacgtttaattcgatgtcttctgcttttccgttctgtccgatgaccattccggcatagactttttcaccaggtccgataaacaaagtaccgcgttcctgtgcgctgtagagtccgtaagtgacagactcaccggtctcaaatgcaatcagagatccctgtttgcgatactggatatctcctttatacggcgcatatccgttaaagcttgtgttgaggattccgtttcctttggtatcggtcataaattctccacggtatccgatgagtccgcgggcaggaatcagaaattccagtcttgtataaccgccgctggaaacgcccatgttctgaagctctccctttctctgactcagtttgtcgatgacagttccggtaaattcttccggtacatccacgtaggcaagctccattggttctaattttttgccgttttcatctgtgtgatataaaacttctgctttgcttaccgcaaattcgtatccttcacggcgcatattttcgatcaggacagaaaggtgaagctcgcctcgtccggatactttaaagctgtcggcgttctccgtctcttccacacgcaggctgacatcggtgttcagttcgcgcagaagacggtcgcgcaggtgacgggaagtaacgaattttccttctcttcctgcaaacgggctgtcattgacgatgaactgcatggagatcgtcggttcggaaatcttctggaatggaatggcttccggattctcaggagagcagagggtgtctccgatggaaatatcggaaataccggaaatcgctacaatagaaccgatcgtggcttcttttacttctactttgttcagaccgtcaaattcatacagtttgctgatcttgactttctgctgcttgtccggatcgtgatggtttaaaaggagcatatcctgattgacacgaatcgttccgttgtctacttttccgactccgatccgtccgacgtattcattgtaatcaatggtactgatcagcatctgtgtcggtgcctcgggatcgccctccggagccgggatgtattcgaggatcgtctcaaacaatggctgcatatctttttcttcgtcagaaaggtcaaggaccgcaattcctgattttgcggaagcatagacaaacgggcagtccagctgctcgtcagaagcatccagttccatgaaaagctccaggatctcatcgatcacttcatccgggcgggcttccgggcggtcgatcttattgatgcagacgataaccggaaggtctaattccagtgcttttctcagtacgaatttggtctgcggcatggcgccttcaaaggcatcgactacaagtacgacaccgtttaccattttcaggacacgttctacttcaccgccgaagtccgcatgtccgggcgtatcgatgatgttgatcttggttcctttgtaatagacagcagtatttttggagagaatcgtgattccacgttctctttcaatatcgttggagtccatgacacgttccgcaacatcctgattttcgcggaatacaccgctttgttttaagagctcatccacgagtgttgtttttccgtggtcaacatgagcgataatggcaatatttctaacatcttcacgttttgttttcataattttacactctttcctacttatgttaatgtgtgttctcttgttacaactttttcattctatcataaatttcagattttacaagtactcttgtgacaggcaaataaaaaaattgtcgatagattttgtcgaatggtttttcggacaatcgggtctaaactgcggtatgatgtcatagacttaagttgactcaaaaatataaaataccacatacgaggaagggagtactacaaattatgtcagataagattattgaaaacaatcaggtaaccatcatgggagttgtggcatccgggtttacatacagccacgaggtgttcggagagggattctatatggcggatgtgcttgtgaagcgtctgagtaattcaaatgaccggattcctctcatgatctcagaacgtctgatcgatgtgacgcaggattatacaggagaggcgatcaaggtatccgggcagttccgttcttataaccggcatgaagaacagaaaaaccgcctggtgctgtctgtgtttgtaagagaggtagaatttattgacgaggaactggatggggcgaaaacaaatcacattctgctggaggggtatatctgtaaaaagccggtgtacaggaaaacaccgcttggacgggaaatcgcggacctgcttctggcggtgaaccgtccgtacggaaaatcggactacattccgtgtatctgctggggaagaaatgcacggtatgcgtccggatttgaagtgggagagcatgtacagatactgggaagaatccagagcagagattatgtgaagaaaatttccgagaccgaaacacagacacgaacagcctatgaagtatctgtgagcaagctggagtgcatggaataggacgtttttcacattcccatcgttgacatcacttctgaataatgataaaatttcataaacattactgagtagagaatcgacaaggtcaggaggataaatatgtcaatttttacaggagcaggagttgcgattattacaccatttcatgcagatggaagtgtgaattatgaaaagctggacgaattgatccagtttcattgtgataacggtaccgacagtattgtgatctgcggtacaacaggggaatcgtctacattgacggaagaggagcatatggactgcatcaagtttacgatcagacagacgaaaggacggattccggtcattgcaggaacaggttccaactgtacacggactgcagtcgagatgtcaagagaagcagccgagagcggtgcagatggcgtacttcttgtaaccccatattataataaagcgacacagacgggactgattgcgcattataaggcgatcgcggccgagacaaaagcgccgatcatcttgtacagcgtagcgagcagaaccggagtgaatattgagccatccaccgtagcgacactggcgaaagagactgacaacattgtggcagtcaaggaagcatccggaaatatctcacaggtagcgaagatcttgcagctgacagacgggaaagtggatgtatattccggaaatgacgatcagatcgttccgatcctgtcactgggcggaaaaggtgtgatttctgtattgtccaatgtggctccgagagagacacatgatatctgtgcaagcttctttgcgggagatattgcgggaagcagggcattacagctgaaggcacttcctctgattgaggcactgttctgcgaagtgaatccgatccccgtgaaaaaagcagtgaatctgatgggaatggaagtcggcggattgagaatgccgctgacagagctgagtgaagcacataccgcgcagctgaaaaaagcaatgcaggagttcggaattcagttagcataaaaaattgttaaaaggatatcatagattgagcaaatagccagaatgtgatatccttttttgtatacccatccgggcaaagtctgtcttttgcaggcgtgtattgcaaagtccggatcggtatagcgtgaaagaataacgttttccggtgtggaaaatgaaagatacagaacgaggaggaaatcaggatgataaagataatcatgcatggctgcaatggaaaaatgggacaggtaatcacaaaaattgcggcagcagacagcaaagtggagattgtagcaggtgtggatcagtttcagggagtgcagaatccgtatccggtgttttcatcgattgaagcgtgtgatgcagaggcagacgtagtgatcgatttttccaatgcggcagcagtggacgggcttttggactattgtgtgaacagacagcttccggtcgtactttgtaccacgggactttctgaagcccagcttgaaaaagtagaaaaagcagcagagcagacagctgttttgaaatcagcgaatatgtccatggggatcaatctgctgatgaagctcttgaaagatgccgcaaaagtactggcgccggcgggatatgatattgagctggtagagcgtcatcacaaccagaaagtggatgctccaagcggtactgcactggcacttgcggattctgtcaatgaagcactggatcatgaatatacttatgtatatgacagaagccagtaccgcaaaaaaagagaagagaaagaaatcggaatttcagcggttcgcggcggaacaatcgtgggagagcatgaggtgatctttgcaggaatggatgaagtgatcgaatttaagcatacagcatattccagaaacgtgtttggaaaaggcgcggtggaagcagccaagttcctggcgggaaaaacagccggcatgtatgatatgagtgatgtgattcagttttaatcagagtttgagtaaagagcggggagtgtcatgaaagaattagagacaagatatctggagcggctgtcggatttgtatccgacgatcgcggcggcttctacagagatcatcaatctgcaggcgatcttgaatcttccgaaaggaaccgagcattttctgacggacattcatggggaatgggaggcgttttcccatgtgctgaagaatggatccggtgcggtgcgaagcaaaatcgaggatgtattcggatatacgcttgggaagagggaaaagcaggagctggctactttgatctattatccaaaagagaagacagagcaggtaaagcggaccgagaagcatatggaagactggtataaaattcagctgtaccgcctgatcgaggtgagcaaacgggcagccagtaagtatacccgttctaaagtacgcaaggcacttccgaaagattttgcttatgttatagaagaactgatcacggaaaaggcggagcttcatgacaaggaatcctactataatgagatcattcagacgatcatccggatcggcagggcagaagaatttatctgtgcgatcgcagatctgatccagaggcttgtgatcgatcatttacatattgtcggtgatatttatgacagaggaccgggcccgcatattatcatggataagctgatgacctatcattcagtggatattcagtggggcaatcacgatgtgctctggatgggagcggcagccgggcagagagggtgtattgccaatgtcattcggatttgtgcacgttatgggaatctggatattctggaggatggatacgggatcaatcttctgcctctggcgaattttgcacttcgcatttatggggacgacccctgtacctgtttcaggcgcaaaggaagcgaacgcctgcaaaaggcggagatggagatgaatcttcggatgcacaaggcaatttccgtgatacagtttaaggtagaaggaaaactgattcttcagcatccggaatttcagatggaagaacgtgcactgctgcacaggattgattataaaaaaggcacgatcctgctggatggaaaagaatatccgttaaaagatgatagctttccgaccattgatccggcagctccgtatgaactgaccgaagaggaagaggagattatggaacgtctggaaaaagcatttgcaggatgtgaaaagctgcaggatcatatgcggtttttgcttgccaaaggtggattatacaaggtgtataacaacaatcttttgtatcacggctgcgtaccgcttagagaggacggatctttaaaggaagtacagctctgtggaaaaagctaccgtgggaaaagtctgtatgatgcactggaaggctatgtaagaaaaggctttttcgcgctggatgaacaggaaaaagagcagggaaagaatatcatgtggtgcatctggcagcatccggattctccgttgttcggaaaagacaagatggcgacctttgagcggtattttatcgaggcaaaagagacgcatctggagaaaaagaatccgtactacgaacttctggaaaaagaagcggtggtagacgagattctggaagagttcggactgcacccggagggagcccacattgtcaacggccatgttcctgtaaaatgtaaaaacggagaaagtccgatcaagtgtaatgggaaagttctggtcatcgatggaggtttttccagggcgtatcagaaagagacgggaattgcaggatatacccttgtctacaactcctatggtcttgttctggttgcccatgagccttttgagtcgaaagaggctgcggtggaaaagggaagcgatattcattcggattacatggtagtgaaacgggtgacagaacgccgtctcgttggaaatacagatatcggcaccgagttaaaagagcaggtagcagatctggagtcgctgcttgcagcctacagaagcggtcaggtgattgaaaaactataagcagagacttacgtgaaaagaaaggcatgaaaatatatgagtaaagagatagaaaaggaactgttgggggaagaactggatctgggagcagagacagaggatctggtgccggattcggtggatatgacggaaccgttaaagatttatttaaaagagatcggcaggataccgctgcttacagcagaggaagaactggaacttggcagacagatcgcagaaggagatacagaagcacgacgaaagatggaggaagcaaatctgcgtctggtggttgcagtggcaaagcattatgccggaaaaggaatgcagtttatggatttgatccaggaaggtaatatcggtctgatgcgtgcagtggaaaaatttgactacacaaagggcagtaaattttccacctatgcggtatggtggatcaaagaagccattctgcgggcgctggattcccagtccagagagattcgcgtgccggtccgtgtagctcagaatatgaataagatcagcaaaacagagcggaagatggaacagacactcgggcgtgaagttgctgcagaggagattgcaaaagagctgcatatgacaacagaagaagtagagcgcatgcagagctatatcaaaaatccggtttctctggagactccggtgggagacgaagaggacagcaatctggaagactttattgaagatacacaggagccgactccggaggaggctgttgcggcactggtacagaaagaagaagtgcaggagatgctttccacgctgacagaaaaagagcagaaaatcttaagactccgctacggtctggaggacggtaatgtacatacgctcgaagaaaccggacagatactcggcgtgaccagagaacggatccgtcagctggagtcaagagcattggaaaaactgaggaaatcagcaggaccaagagcataaaaaagaaaaaaattccattcataaaatattaaaaaaaggaaaacttaacagtgtaagactatattttatgaaaggaagaagattatgaaaaacagaaaaaaactgcttgtattgctgatgtgtacctgtatgcttctaggcacgactgcatgtggaaacagaagagatacacagaacgatacaacaatgaatgatgcaactgacaaaacaaaggacaacaatgacaagacagacagaaatgaaaaccgtacagatgacaacagtaacggaaaggcagacaacgtggtggatgatgtcacagacggtgtgaatgatgtagtggatggtgtgaccaatggagtggatgatctgacaaggggagccacggatgcggtagatgatgctgcggatggaatgaccaaagatcataacgcacagaaccgggagaataacaagtaggttttgaataccggataaacaagtgctgcagaagaagtttttgcagcacttttctataaaaggagaattgtgatgaagttcagaccttgtattgatatacataacggaaaagtaaaacagatcgtcggcggcagcttaaaagatgaaggcgatatggcacagaccaattttacttcagaacaggatgcagcctggtatgcagaaaaatataaacaggatggactcaaaggcgggcatatcattctgctcaattccagagattccgaatattttgaggcaacgaaagcgcaggcgcttctggcgctttcggcatatccgggagggatgcagatcggcggcggtatcacggcggaaaatgcagaagaatatctggatgcgggtgccagccatgtgatcgtaacctcttatatatttcgtgaaggagaggtggatcgcagccgtttgagacgactgaaagatatggtcggaaaagagagaatagttctggatctgagctgccggaaaaaggggaatgactattatatcgtgacaaaccggtggcagacgtttaccagagaaaaactgtcagaggaattgcttgatgaaatggcgcagtactgtgatgaatttctggtacacggtgtggatgtggaaggaaaatcttccggagtggaaggagagcttgtagaactgcttggcagatgggaagggattcctgttacttatgcgggcgggatcggaagtatggaagaactggaaaaattcaaaagtcttggacatggaaagctggattttacgatcggaagtgcactggatctgtttggagggacaattccttataaaaatctgctccgtttgtaaatgaaatgtaaacaaagcggaacaaaaacatgaattggttgaattcatggaaagttagtgatagaatggtaggcagagtaaatttagacaaggagcagattgcagattatgggtttaatggataaaattttcgggactcacagccagcacgagctgaagagaatctatccgatcgtggatcgcattgaggcgctggagccagagatgaaagcgctttcggatgcggaattaaaggataagacaagagagtttaaagaacgtctcaaagagggagagactctggatgatattctcccggaggcatatgcagttgtaagagaaggtgcatatagaagtatggggatgcgccattaccgggtgcagctgatcggtggtatcatcctgcatcagggacgtatcgcagagatgcgtacaggtgaaggtaagacactggtatccacacttccggcatatctgaatgcgctggaaggaaaaggagttcacattgtcacagtcaatgattatctggcaaagcgtgatgccgagtggatgggaaaagtacacgaatttctgggactgacagtcggtgtggttctcaatgatatggacaatgatgagcgccgcgcggcatataattgtgatattacatatgtaacgaacaacgaactgggatttgattatctgagagacaacatggtgatctacaaggaacagcttgtacaaagagggctgaactttgcggttatcgatgaggttgactccgtattgatcgatgaagccagaactccgctgatcatttccggacagagtaataaatctacaaaattgtatgaggcatgcgatattctggcacgccagctggaaagaggagaagcaagcggtgagttttccaagatcaatgcgatcatgggagaagatattgaagagtccggagattttattgtcaacgagaaagaaaaggttgtcaatctgacagaagacggtgtgaagaaggtagaaaacttcttccatatcgagaacctggcagatccggagaatctggagattcagcacaacatcattctggcgctgcgtgcgcataacctgatgttccgcgatcaggattacgtggtgactcaggagggagaggttatgatcgtggatgagttcaccggacgtatcatgccgggaagacggtattcggacggactgcatcaggcgatcgaagcaaaagagcatgtgaaggtcagaagagagagcaagacactggcaactattacattccagaacctgttcaacaagtatgagaagaagagcggtatgacaggtactgccttgactgaggaaaaagagttccgtgatatttacggaatggacgttgtagagatcccgaccaaccgtccggttcagagaaaagatctcgaagatgcagtatataagacaaaacaggaaaaataccacgcagtcgttgaagccgtgaaagaagcgcatgcaacgggacagccggtcctggttggtacgatcacgatcgaggtttcagagttgctcagcaaaatgctgaaaaaagaaggaattcagcataaggtattgaatgccaagtatcatgaactggaagcagaaatcgtggcagatgcgggacagcacggagcagtcacgattgcgaccaacatggccggacgtggtacggatatcaagctggatgatgctgcaagagaggccggaggtcttaagatcatcggtacagagcgtcatgaatccagacgtattgacaaccagctgcgcggacgttccggacgacagggagatccgggagaatcccgtttctacatttctctggaggatgatctgatgcgtctgtttggttctgaacgtctgatgagtgtattcaacacacttggtgtagaggacggagaacagatcgagcataagatgctctccagtgcgattgagaaagcacagaagaagatcgagggcaataactttggaatccgtaagaatctgctggaatacgatcaggttatgaatgagcagagagagatcatttatgaggaaagacgtcgtgttctggacggagagagcatgcgagataccatctacaatatgatgacagaatatgtagaaaatatgacagaccgctttgccgcaccggatgcagattcggaagaatgggatctgtcaggactggagctgacacttcacggggagattccgatgctgaagatgccggatgcagaggaagtcaaggacatgagacagaaagagctcaagcatacattgaaagagcgtgctgtaaaagcatacgaggagaaagaagcagaattcccggaagcagagcagctgcgtgagatggagcgagtggtactgttaaaggcaatcgatacacgctggatggatcacatcgatgatatggatcagctccgtcaggggatcggtcttcaggcatacggacagagagatccactggtagaatataagatgatgggatacgatatgttcggcgagatgaccaattccatcgcagagacgacgatccgtaccttattccatatccggatcgagcagaaggtagaaagagagcaggtggcacaggcgaccggaacaaacaaagatgacagcgcatcacacactccgaaaaaacgggaagagaaaaaggtttatccaaatgatccatgcccgtgcggaagtggcaagaagtacaaacagtgctgcggaagaaaatagtaaccaggtaagtgcctgaatattttgttgactgtgtgtatactgcatcagacattgtgctgcaatatatacacagtcaatgttgatttaaaacagatttttgaaaaaagaaagaggtgatcaaggtggttttattagatgaactgaaagtaagactgagtgcatacgaagagccgctgaaagatttgagggattcactttgacttagcgtcaaagaaagaacgaattgaggaattagaaagaacgatcgaggagccgggattctgggataatccggatcagtccagacagacgatgcaggtattgaaaagtcttcaggattcggtaaagcagattgagcagatgtacgcagattatgaggatctgggacttctgattgagatgagtcaggaggaacaggacgaagagacggtgcaggagattgaggaagaactgctccgttttgaaggagagtttgaagagctgaggatccagacacttctgaccggagagtatgacagagatcatgcgatcgttacgcttcacgccggagcaggcggaacagaatcctgtgactgggcaaacatgctttacagaatgtacaccagatgggcagagaaaaagggattttccgtagaagttctggattatctggaaggagatgttgcgggaatcaaaggcgtgacatttgaagtacgaggagagaatgcttacggatatctgcgctctgaaaaaggggtgcacagactggtcagaatttctccgtttaatgcggcaggaaagcggcagacttcttttgcatcctgtgatgtgattccggatattgaggaagatattgatattgaaatcaatgatgacgatatcaggattgacacatatcgttccagcggagcgggcggacagcatatcaataagacttcttcggcaatccgtatcacgcatttcccgacaggaattgttgttcagtgtcagaatgagcgttctcagcacatgaataaagacaaagccatgcagatgctcaaagccaagctgtatctgatgaagcagcaggagcaggcagacaaagtgtccggtattcgcggtgagatcaaggagatcggattcggaagccagatccgttcctatgtcatgcagccgtatacactggtgaaggatcaccgtacgaatatggagatcagcaatgtgaacggtgtgctggacggcaacctggatccgtttatcaacgcatatttaagtgctccgaaaaacccggaagagtaggacagatgcagaaaaaagaacaggaaggaaggcgaatatggtaaatatagcagttatgggatatggcacggtgggatccggagtcattgaagtattacagaccaataaggaacgaatcgaccagagagccggggatgagatccatgtaaaatacattctggatctgagagatttcccgggagatccgattcaggaaaaaatcgtacatgattttcaggtgatctcagaagatccttccattcagatcgtagtagaggtaatgggcgggatcgaacccgcatatacttttgtgaagaagtgcctgatggccggaaaaagcgtggtgacctccaacaaagcactggtggcaaagcacggtgcagagctgctttccattgcaagggagaaaaatattaattttctgtttgaggccagtgtcggaggcggaattccgatcatccgtccgttaaattcttcaatgacagcagatgagattgaagaaatcacagggattttaaacggaacgaccaattatatgctcagtaagatgttttatgaaggagcagattatgaggaagttttaaaagaggcgcaggaaaaagggtatgcggaacgaaatccggaagcggacgtggaaggatatgatgcatgccggaagattgcgattctttcatctttgatttccggacagcaggtggattttgaagatatttatacagaggggatcacgcagattacaaaagaagatatgatgtatgcaaaggcaatgggaatgacgattaagcttcttgcatgcagcagaagggatgaagatcatatccatgccatcgttgctccgtatctgctgagctcttcgcatccattgtatagcgtaaatgatgtctttaatgcgatttttgtacatggcaatgtactcggagatgcaatgttttacggaagcggtgcaggaaagcttccgacagcgagtgcggttgtttctgatattgtagatgaagtaaagcatttgaaccggaatattatgacgatgtgggatcaggataaagtggaactgcttccgatctcggatacgagcaagcgtttctttgtgcggatcaagggagatccacaggcaatgaaagcacatctggaaagtaaatttggactgattgagattgtacaggtggaatcgttggagggagaattcggatttctgacagaaattatgacagaaggacactttgaacagtgccagaaagaatttccgtccattctccaccggattagagtagaagggtgaggtgcgtatgaaatatgttgttgttttatgtgacgggatggcagatgaaccgttggaagaactgggcggtatgacacccctggagaaggcgcatactccaaatctggaccgcatggcgcagatttcagagattggcatggttcagactgttcccgacgggatggctccgggaagtgatacggcgaatctttccgtgatcggatatgacccaaaagaatattataccggacgttcccctttggaggcactgagtattggggtggatatggcaccgacagatgtgtctttccgctgcaatctggtgacactgtccgaggaagaagagaactatgaagataaacatattctggatcacagttccagtgagatcagtaccgaggatgcggctgttctgatggagaccctgatgcaggaaatgcgaagaggcgggtatgagttttatacaggcacgagttacagacatttgctgatccataaatttggaagtgtagttgaattgacagcgcctcatgatatcctgacaaagcggatcggggagtatctccctcaggatgcggtacttcgggagatgatggagaccagttaccggatcttaagcaatcatccgctgaatctggagcgaaaggcaaaagggctcaatcctgccaattccgtatggttctggggggcaggcaccaggccgatgctgacctcctttgaggaaaaatatcataaaaaaggagctatgatctcagcagtggatctgttgaaggggattgctgtaggagcagggcttgacaatattatcgtagaaggtgcaaacggaggacttcatacgaactatacaggaaaagcggaggcagcagtggacgcgctggcggcgcagaattatgattttgtatatgtacatattgaagcaccggatgagatgggacatcagggaagtattccggataagatcaaggcgattgaaaatatcgatcagaagatcatcggaccgatcgttggggaactggaagatctttgcatggatttcagaatgttagtccttccggatcatccgacgccgatctgtgtccgcacacataccggtaatccggttccgtatcttttatatgattccagaaagaaagcagaaggaatgccggagtattcggaaaggctgggcaataagagcccattgttcgagaaagaaggacacaggcttctttcccatctttttgagatggacaatgaacggtaaacagagaggaagaaaaaatgctgatagtaaagaagtttggcggcagttcggtcgcagataaagagtgtatttttcgtgtggcagagcgctgcgcggaggattataaaagtggacacgatgtgatcgttgtcctttcggcaatgggagacacaacagatgatctgatcgcaaaagcaaaagagatcaatccgaatccatccaagagagaactggatatgctgctgacaacaggggaacagatttccgtatcactgatggcgatggcattccataagctgggaatcccggcagtatcgctgaatgcgttccaggtgaagatgcacagtacatccacctatggcaatgcaagattcaagaaagtagagtctgagaggatcctccacgaactgggataccggaagatcgtgatcgtcactggattccagggagtgaacaaatatgaggattatgcgacaatggggcggggtggttcagataccacggcagttgcaatcgcagcggctctgggcgcagatgcgtgtgagatttatacggatgtagacggtgtgtataccgctgatccacgaattgttccttctgcgagaaaattaaaagaaatcagttatgatgaaatgcaggagctggcatccatgggggcaaatgtcctgcataaccgttctgtggaaatggcgaaaaaatatggagtacagctggttgtacgttccagcatgaacagagaagaaggtacggtggtcaaggaggtagtaaaagtggaaaaattgttaatcagcggagttgcatctgacaaaaatacagcgagaatttctgtcatcggaatcgaagacaaaccgggaacagcgttcaagatcttcaatacacttgcaaagaagaatatcaatgtggacatcattcttcagtctgtaggaagagacggtacaaaagatatttcctttacagtggcagaggatgatcttcaggatacactggcaatcctggaagaaaataaagaagcgctgacgatccaggagatcaattctcaggagagtgtagcgaagatctcgattgtcggagcaggaatgatgagtaatccgggtgttgctgccaagatgttcgaggcactgacaaatgccagagtcaacatccatatgatttcaacatcagaagtaagaatcacggttctgatcaatgaaagcgatgtagaacgtgcgatcaatgcagttcacgagagatttggactgggagaataataaaaaaaggaaatccgactggagctggcggatttcctttttctttattacaacagttttttcaatagtaatttatcttccggattcatggcccggtatcccttgatcagttcgacttcttcccgcgtaagatagagtgtatcggcagtgtcgatctccatggcatacgtaaagggacctttctgttcgaggatcagtccgtcttttgtacagggatgattaaccagctggtcgagagatactccatagatatcagccagacgcatcagagaatccagatccggtgtccgtttgctggtttcgtagttagaataagcctgtctggaaatattgagcaagtcactgatctcttgctgagtgtagtgatgtgctttacgaagacggtataaattttcaacaagctgaatattagacattgctgtacctccatttacagggaattgttaaaagcttagtaaattataacaattttccctataaatagatatctatgcgacaaaacgtagcgaaagaacaaaaagccacaaaaaagttgatatcagagtttactgagtgtactgttatgataggaagaagaaaaggtaacgtcttcgccgaaccattcgggcggagtaaagtgattggcagtctcttcatccggaaattctacttctgcaagcatcagaggcgcaaggtctccggaaaaaatatcaagctcaataaagaggaaatccttaagagggatcacatatcttttttttgtgatcagccgtccgtcgattttttcttttaaatgttcataggattcttttgtcagcggaaggttgtattcttcccggatcatcattcctttggatttgtaagtcagaatgtagtcattgttgtcccggcggatacgtaccacaggtgcagtggagaggtatccctgttcgatcttgcggcatggatatgatgaaagagcaaaggggacagatgaaatcagatatttgcgctcgatttccatgaaaaactcctttctttgaaaacatcgtttgttgtttgatattcggtatcatcataatatgaaaaacggaaaatgtaaacggggaggcattgcatttttaacagggatttgctacactttttaccatatgaaagaaatgaaaatcaggttcagattttaagtcaggaggaaatgatcatgaaacagattgcggtatttctcgcagaaggatttgaagaaatcgaaggacttacggttacggatctgctgcgcagggcaggcgttactgtgacgaacgtatcggtcacaggagaaaagacagtacatggctcacacggaatcggtgtcgaggcagacgccctgtttgaggagatggagtttgagggaatggatatgctcgtactgccgggtgggatgccggggacaaagcatttgaaagaacacagagatttgtgtgtgctgctcaaagaattttatgcaaaagagcgttatctggcagcaatctgtgcagcgcctactgtatttggagaactgggatttctggacggcagaaaagcatgctgttatccgggcatggagtcagggctttctcacgcagagacaaatgaagagccggtaaatgtagacgggcatatgatcacaagccggggactgggaaccgcgattccattcgcattgaagctgatcgagctcctgtgcggaaaggaaaaggcagaagaaatcgggcatggagtagtttattattaaaaagtactggaaatattgaagtgactatgctatactaattcaatgactgcgaatatacaatttgcgtttgaatggtacgaatcaaggaggaaatagaaagatgagtttacaggtagaaaagttagagcataatatggcgaagcttacagtagaagtagctgcagaagatgtagagaaagcactgcaggcagcttacttaaaacagcgcaaacagatcaacattccgggattccgtaaaggaaaagttccgcgtcagatgatcgaaaaaatgtacggaccggaagtattctatgatgaagcagcaaacaacatgattccggacgcatatgcaaaagcttatgatgaaagtgaactggacatcgtgtctcagccgaagatcgaggttgtacagatggaaaaaggaaaaccgttcattttcacagcagaagtagctacaaaaccggaagtgacactcggagattacaaaggactgaaagtagataaagtatctacaagagtgacacagaaggaagttgatgaagagattgaaaaagagcgcgagcgcaatgcaagaacaatcgaagtgacagaccgcgcagttcaggataaagatgaagtaacattagatttcgaaggatttgtagacggtgttgcatttgaaggtggaaaaggagaagattatccgctgacaatcggttccggatcattcattcctggatttgaagagcagctgatcggagctgagatcgacaaagaagtagaagtgaatgtgacattcccgaaagagtatcactctgaagagcttgcaggaaaagatgctacattcaagtgtacagtacacacaatcaaagcaaaagagcttccggagctggatgatgaatttgcttctgaagtttctgaatgtgagacaatggacgcatacagagcggaagtaaagaaaaacatcaaagagcgcaaagagagaaccggaaaagaaaagaaagaaaaccaggcagtagatcaggcaatcgagaacgcacagatggatattccggaagcaatgatcgagttccaggtaagacagatggcagatgattttgcacgccgcattcagcagcagggtctgactgtagaacagtacttccagtttacaggaatgacagcagagaagatgatggaagagatgagaccacaggctgaaaagagcatcaagacaagactggttctggaagcgatcgtaaaagctgagaacattgaagtttctgatgagcgtgtagaagaagaactcacaaaaatggcggaagcataccagatggaagtggaaaaactcaaagagtttatgggagagaacgagaagaaacagatcaaagaggatcttgcagttcaggaagcaatcactctgcttgtaaacgaatctgtagagggataatctgttctggtacataacagtaccgtgaatccgcagtgagagggggccgcaggcagcggcagattaagtcagcataataaggaggaaaagcaaatgagtttagtaccttatgttattgaacagacaagccgtggagagcgctcttacgacatttattcaagactgttaaaagaaagaatcatttttctgggagaagaggtcaatgatgtatctgcgagtgtgatcgtagcacagcttcttttcctggaagcggatgatccgaataaggatatccagttatatatcaacagcccgggaggttccgtgacagcgggactggcaatctacgataccatgcagtacatcaaatgtgatgtttctacagtctgcatcggtatggcagcaagcatgggggcattccttctttccggtggagcgaagggaaaacgttttgcacttccaaacgcagagatcatgatccatcagccatccggcggagcacagggacaggcaactgagatttcgatcgcagcagagcacatcctgagaacccgtcagaaattaaacgagatcatggcggcaaacacagggcagccattggagacgatcaaggctgatacagaacgtgataacttcatgtctgcagaagaagcaaaagcttatggattaatagatgaggtaattgccaaacattaatgttgtgtcggcaatatgaggtgagagtgatatggcaggaaaagcaagtgatgatatagtaagatgctccttctgtaataagccgcagtctcaggtgagaaagctgatcgcagggccgaacggcgcttatatctgtgatgagtgtatcgaggtctgctcggagattatagaagaagagtttgaatacgatgatgacagaagagaatttgatgatatcaatcttttgacaccagaggagatcaaggcattccttgatgaatatgtaatcggacaggacgaggcaaagaaggttctttctgttgctgtatacaatcattacaagcggatcatggcaggttctgatctgggcgtggatctgcagaagagtaatattctgatgcttggaccgaccggatgcggaaagactctgcttgcccagaccctcgcaaagatactgaatgttccgtttgccatcgcagatgcgacagctctgacagaggccggatatgtgggggaagatgtagaaagcatcctcctgaaagtgattcaggcagcagatggcgatattgaacgtgcagagcatggtattatttatattgatgagattgacaagatcacaagaaagtctgagaatccttccattaccagagatgtatccggagagggagttcaacaggcgcttttaaagatcattgagggaaccgttgcatctgttccgccgcagggcggaagaaagcatccgcatcaggaactgatccagatagacacgaccaatattttgtttatctgcggcggtgcatttgaagggattgataagatcattgagaccagactggataagaagtcgatcggctttaatgcagagatagctaagaagcatgaggaggatgtagatgtactgctgcatcaggtgcttccgcaggatctggtgaagtttggtctgattccggagctggtaggacgagttcctgttacagtatctctggatcttctggataaagaggctttgatccggattctgacagaaccgaagagctctcttgtgaagcagtatcagaagctgatggaactggacggcgtaaagctggagtttgataaagcagctctggatgcgattgcagagacctctctggcaaggaaaacgggagccagaggattaagagccattatggaagatattatgatggatacaatgttccgtgtaccatctgatgataccatcaaaggatgtatgattacaaaagatgttgtggaaggaaaggggcagccattgtatgagtgcgatggagaagagcgaaaatcttttctgacatctgaaagtgcatagataacacaggcgggcgcatagggaggaccatgtacccgcttgttttgattttggataaaacaaaaagcaggaggaaaatacaggtgaacagagaaataaaaagccttccgatggtagctctgcgtggaatgactatcatgccggaaatggtagtacattttgatgtgagcagagaaaaatcaatcgcagcaattcaggaagccatggcgggagaccagaagatttttcttgtggcacaaagatcaatagaaacagacgaccctatacaggaagatgtttacgaggtgggaactgttggaacgatcaaacagatcatgaagcttccaaagcatatcgttcgggtacttgtttcaggagaaacaagaggaatcttaaaacagcttcagcaggatacgccgtatctgcgggcagaggtcgaggtgatcgatgagtccgatcttgtcattcaggatgatttaaatggagaggcaatggcaaggagtcttaaagatacttttctggactatgccgctcgcaacggaaaaatgtcaaaagaagcagtggcagagattttggagatcaaaagcctgaaaaagctggtggatgagattgctgcaaacacgcctttttattatgttgatcaacaggaaatcctcggaaaagtggatttttgggagagatatgagacattggcgtttaagctggtcaacgaagtgcagatcatggatatcaaagatgaactgcagcaaaaggtgaaggaacgtgtggataagcatcagaaagaatacattcttcgggagcagctgaagctgatccgggaggagttgggggatgattctacattgtccgatgcggaagaatttgaaaaagcagcaaagaatctgaaagcgccaaaggaagtgaaggaaaagctgaaaaaagaaatcagcagattcaaaagctcactgaacagtccggcagaaagcggtgtgatacggacctatattgaaacattgcttgagatgccgtgggataaagccgggaaggacaatcaggatatcaaatatgcagaggaagtgctggaagcagatcattatggtctggaacaggtcaaagaacgaattctggaatttctggcagtacgttctctgacgaaaaaaggggagagcccgatcctgtgtctggtgggaccgccgggaaccggaaaaacatcgatcgccaaatctcttgcaaaggcactgaagaagccgtatgtaaggatttcgcttggcggagtgcgggatgaggcagaaatccggggacacagaaaaacatatgtaggagcaatgcccggacgcatcgcaaatggaattcgtcaggcaggtgtcaagaatccgttgatgcttctggatgaaattgataaagtcagcacagactataagggagatacgttctctgcgcttctggaagtactggacagtgaacagaattacaaattccgtgatcattatctggaagttccgctggatctgtcggaagtgctgtttattgccactgcaaattcactgcagacgattccgcgtccgcttctggaccgtatggaagtgatcgaggtgaccagctacacagagaatgagaagctgcatattgcgacagagcatttgatcccaaaacagctggagaaaaatggtctgaagaaagaacagctgaaaataagcaaaaatgcagtctggaagattgcatccaactatacaaaagaagcgggagtacgtcagctggagagagaaatcggtaatatttgcagaaaagcagcaaaagaaatacttacaaccgggaaaaagagtgttacaattacagagaagaatctgttcaaatatctgggaaaagagaagtttacgtatcagatggcaaatgcagcggatgagatcgggattgtgcgtggactggcatggacaagtgtgggtggggataccctccagatcgaagtgaatgtgatgcctggaaaaggcgagatcatgctcacaggtcagcttggagatgtgatgaaagaatcagcacggaccggaatcagctatatccgttctgtcagcagagattatcagattgcggatgacttttttgaaaaatatgatatccatgtacatattccggagggtgcagtgcccaaagacggtccgtcagccggaatcaccatggcaacggcaatgctttctgcgatcacagaacaaaaggtgcgtgcagatattgccatgacaggagaagtgactctgcgcggacgtgtactgccgatcggaggattaaaggaaaagcttctggctgcgaaaaatgccgggataaaaacagttcttgttcccaaaaagaatctggcagatgtagaagagctttctcaggaaatcacaaaaggattcgagatcctgcctgtagaacatatggaggaagtgctgaaggcagcatttgtgtcagacgatcaggataaaatatccggaggggagtaaactatggtaataaagaatatcaatctggaaactgtttgtggaattacaagtaaattgccggaaaatgagaaaccggagattgcgtttgcggggaaatccaatgtgggtaagtcatccctgatcaatgcgctgatgaaccgaaaatcgtatgcccggatctctgccacaccgggaaagacacagacgattaatttttataatatcaacgaggaactttatctggtggatctgccgggatacgggtatgcgaaagtatcggaaaaagaaaagatccagtggggaaatctgatcgagcgctatctgcatacatcaaaacagttgaaagcagtctttcttctgatcgacatccggcatgacccttcggcaaatgacaagatgatgtatcagtggatcgtcgatcagggatttcagccgatcatcattgctacaaagctggataaattaaaacgcagtcaggtgcagaagcatgtgaagatgttaaaaacaggtctgaatctgcttccgggaacaaaagtgatcccgttttcttcggttacaaagcagggaagagacgaaatctgggatctggctgagcgggaatatctgtttccggaaagatttttggaggatgaaacgaaagaataatttcggagaatgatagagtaaacaggaaaagcacgatgcgggaaggagatttttatggagcgaaaaagaccttactggcaagtggcggtaagtcttgtgttcagtatactggcaacggctgcgtttattatcctgggcgtaaaagcaatcggatttctcatgccgttcgttgtgggctggatcatttctgccattgcgacacctctggtgaactggctggaaaagcgattgaagatcgtaaagaagctgggaacagcaatgattgttatcatggtcattgggctgatcgttttagtgggatattttgcagtcagcaggattgcagcggaagtgacagatctgattcagaactttccggatatttatgcacagctggaagaggggatgcgcgagatcggaaataccttatccggtgcgtttagcaggcttccccggggagtgcagaatgggtggacaacgatcgtcgagaatctggatacttatatggggaatcttgtttcgaaaatcagcgagccgacggtgacggctgcgggaaattttgcaaaaagacttccgtcctatctgatttctttcattgttgcgatactggcagcttacttttttacaatccagagagaagaagtgatcgcatggtttcataaaatcgcaccgccgtctgtggaaaagaggatgatcctggtgatggataatctgaaatatgcagtaggcggatatttcaaggcgcagtttaagatcatgggtgttgtttttttgatcctgtttgccggatttcttgtgcttggaattcattatgcggttttggttgcatttttgatttcatttttggattttctgccattttttggaacgggaactgcgttgatcccatgggcaatttactccgtatttatcggtgaatataaaattacagccggtctggtgatcatctatgcagtttcccaggtagtgcgtcagcttttgcagccaaagctggtaggtgacagcatgggaatgaatccgctggtgacactgctgcttttatatgtgggatataagatcaagggagtctttggtatgattctggcagttccgttgggactggtattgatcaatatgtgtcaggccggtgcatttgattatattctggatgacgtgaagattctggttgaagggatactgggacttcgcgaagagcttcctcaagggcaaaaagaaaattcagataacacttgattccaagaatgagagtgtttataatatcaacagaaacaaaaaaggggtgcttgcagaaagcaggctgagagaaagctggattgcttaaaacccgtaacctgatttggataatgccaacgtagggatatacagagaaagtgataggatctgagaagaaaaattgctgctgtgatgcgtttgcgttgcagcagctttttgcatactccgcggcgggcatggaaaggaatgcatatgagaaactatacaacacagatggaagcagcgagaaaacagattgtgacaaaagaactggagatcgtggcacaaaaagaacacatgacgaccgaggagttgatgccgctggtggcagaaggaaaggttgtcatctgtgccaacaaaaatcacacttgtattgatccggaaggaatcggttcgatgctgcgtacaaagatcaatgtgaatctgggagtttcaagagactgtaaagattacgatgtggagatgcagaaggtgatgcaggcagttgagatgggcgcacatgccatcatggatctgtcttctcatggaaatacaattccatttcgaagaaagctgaccagtgagtgtccggcgctgatcggtactgttccaatctatgattccgtgatccactatcaaagggatctggatacgctgactgccagagattttatcgatgtggtccgtcttcacgcacaggatggagtggattttgtgacactgcactgtggcatcacgcgcaaaacaatcgagcagattcggcagcataagcgaaaaatgaacatcgtatccagaggtggttctcttgtatttgcgtggatgtgtatgacaggggaagaaaatccattttatgaatattatgatgagattctggatatctgccgggaatatgatgtgacagtttcactcggtgacgcatgcagaccaggatgtcttgcagatgcaacggacgtctgccagattgaggagctggtgcgtctgggcgaactgaccaggcgggcatgggagaaggatgttcaggtgatggtggaaggtccgggacatatgcctctggatcagatcgaggcaaatatgaaagtgcagcagtccatttgtcagggagcgccgttttatgtattgggaccacttgtgacggatattgctcccggatatgaccatattacttctgcgattggcggagccgtggcagcatcggcaggagcggcatttttgtgctatgtgacaccggcagagcatctggcccttccgaatctggaagatgtaaaacagggaatcatggcttctaagattgcggcacatgcggcagatattgcaaaaggagtgcggggagcaagacaggcagatgacaggatggcacaagccagaagaaatctggactgggaagcacagtgggagtgtgccatggatccggagacggcaaaacggatctggaatgagagaaagcctgaacatgaggatacttgttccatgtgcggaaaattctgtgcggtgcgaagtatgaacaaggcacttgcaggcgaacatattgatattttatagaaacagaataatcagaaaaaccaggcaggatatgttcccgtaaaaaggaaggcatcctgcctggtttttattttgaagctattgtgtcttctctgcgtattcagcagcaagtgtatcaaattcttctgtgtgagtcggataccagacgtcaaaggtgctgtctgctgcggaaattcgttttccgagagctgcgaaaaattccgggattacagtctccagaagaacacctttttcgatgcccagatgtgctccaggttcttcgctgtctccgtttacaaataatttgaatgcaggttccatttttccatccacccgtttggagtgtccgacaagaccgatacttcccgcctgatggcttccgcagctggaaggacatccggaaatatggatacatggaaggactctgtcggcgaactgttccttgcggacccgctgaatgcaggactctaacagtgcataggaattgcgcagtccgtgttggcagattggaacgccgatgcagctgacactgctttcaaataaagaagcagctccgtcttttgtggcttctaacacagcaggtacttcttttgcagtcagattgatgatatacaaggtgccgtccggtgagatccgaagctcggtttccggcatctctttgatcacggcatacagttcagacggtttttgaggtgcaagccgtccgcccagcggatgataagaaaccgtgtacaggccgttctgtttctgtgggagtacccgtttttctgtcagaagtgcttcggacagagtgccgtcagcagatttggaaatcggatggactggttctacaggccatggagtcatttctttttgcgcgtcttccacaaactggaggaaatagttccggattttttcttcgccaagggtatcctgcagatagcgagttctggattttgcgcgtgactcataattgccgtatgtggtaaaaagacgaatcatagcatggacataaagggatacttcgcttggatctgcattgtctgtaatgtgaacgccgagttttggatttggtcccaatccacctgcacagtaaacggaaaatgttccgttttctcttgctacaaatccaaggtcacggaatgtagcatgtacttcattggcctgggtattggaaaatccgacttttaattttcggggcatatgaagtccgggcatctcggtcagaagatattctcctacagcctgtgcatagggaaatacatcgaatgtctcatccggtgcagtgcctgtcagaggacttgccatgacattacgcgggttgtctccgccgccgccatgtgtgatgatgccgacttttaaagcatcacggataagttgtggaacagagtccacggacaagtcatgaaactgaatggtctggcaggtggtcagcttgagcagggaaatctgatgttctgaaatcttatctgcaaggaattttaatttctcttttgtaatatgaccgcccggaagacgaagacgcagcatatatccttgttccttctgtgcatagcttccaaagcctccggagatgcctttgaaggtctggcggtcgatctctccattttcgaaagcatgtatgttttcagcaaatcttgtgatattatcttcaaattgctgtaataaatcttttgaaagcatggtaaatgctcctttctttttgatgggtttagaaactctgtactaagtataataaacggggaaagagagtacaaggggaatttggagattggtcttgattttctttccggatatttaaatatggaacagtaacgagaataaagatagatttccccactccctgttgttataataaagacaaaacgaaaaacaggggaaatagacatggatacaattttgatcatagaggatgacgcagatctcagggaagggttggagtatacattgagtggggaaggctatcagatcctgacagcggaaaatgcagaaagaggacgaaagctatggaagacatcttcctgcgatctgattctgttagactgcaatcttccggatggaaatggcttttcgctgtgcagtgagattcggaaaagcagtgatgtgttcattctgatgctgacggcgagggatacggaactggatgaggtgaaagcactggagatgggagtggatgattatatgtcaaaaccattttctatcgcggtgctgaaagcgcggatcaaaaagctgctctccagaaagagtgaaaaacagtggatcagctccaatggaatccgtctggacaaaagcagctgtcaggtgatctgcaaagaagaagtgctggagctgagtaagatcgagtacaaactgcttttgtattttctggaaaatccgggacagatattgtcaaaggaacagattttagagcggatctgggacaaagacggaaagtttgtggatgagaataccgtttccgtcaatattcggagacttcgcagaaagatcgaggcagatccgcagaatccgcagtggatccagacggttcacggacttggatatatctggagagaagaggagaaacgataaaggtatggaatcgatcataacaggaattctgtcagcaggatgtgtggccggtgttttgtttgggatgtatgagtatcgcaggcggaaaaaactataccgggagacagatcggatgctggaatctattctggagggagatccgatccttgtttcggatttgaaggaaggcgaagtgtcggctctttccgggaaaatccgcaaaatccaggagatgcaggagatgtctgtatctcaggcagaagaggaaaaagagcaggtaaaaagtctgatctccaatatgtctcatcagctgaaaacaccgcttgcgaatatccggatgtacgaagaaatcttgagggaagaaaatcaggacgcagagacaagagaaaagtttctggcaaaaatgcagacgcagagtgaaaaactggaatggatcttaaattctctgtttaaaatggtgaagctggaacagaatgtcatggtctttgaggtttcaatgtgcccgattcgaaagaccattctggatgcggtgaatctggtgtatgaaaaggctgccaggaaacagattctgatcaaaacagggtatataccggatctgcttctttatcacaatgcaaagtggacgtcagaagtgtttgtaaatctgctggaaaacgcagtgaaatataccggtgagggcggaacgattcagattgatcttaatcagtatgaaatgtacgcagaaatccggatcacagatacaggaattggaatccgaaaagaagagattccgcggatctttcagagattctatcggagtaaagacgtagaaaatctggaaggaagcgggattggactgtatttgtccaggttgattgcagaaaaagaaaagggatacattcaggtggaatcggtttatggaaagggaagctgcttttcggtatttctgcggatggaaaaatgacaattttgtcagaactttcttttgggatgtaggatttttgtaagatggggctgttacactgatggtatcaaagagaaaaggagaactggaagagaatgaagattttagaagtacagcatgtggtgaaaacatatggttcccatcaaaatcaggtaaaggcactttccgatgtcagctttgctgcagaacagggagaatttattgcaatcgtaggaacgagcggttccggaaaaagtacattgttgaatctgcttggaggtctggatgttccgacagaaggaaggatatgtatcaggggatatgatatcgggagtctgacgagaaaagaacagacgattttcagaagaagaaatatcggatttgtatttcagaattacagcctgatgccagtgctcaatgtgtatgacaatgtggcattaccgattacttttgacaaagggagccatgtggatcgagagtatatcaggggattattaaacgagctgggattgtgggagaaacggaaacgatatccgagtgaactctccggcggtcagcagcagagagctgcaattgcaagagcgcttgcaaacaaacccgcccttctgctcgcagatgaaccgaccgggaatcttgattctaaaactgcggtggaggtaatcggcctgttaaaagccagcagtcagaaataccatcagacggtgctgatggtgacacataatgaagcgttggcacagtcctgtgaccggattatccgaattgaggacggcaggctgtatcagagagaagacgcattttacggggaaggcggtgagctgtaatgaagcagatcatacgtcttgcctggtcctatctgaaatattataaaaaacagacgatggctctgtttctgggaattgttttgtcctgtgctctgtttaccggaatcggttcacttcaaaagagcggaaatcatgcagcaagagaaaatgcccgcacaaaatccggagactggcactacacgttgcgctgtgacacagactggtttgaggagtttgagaaaacgtatcagacgggggaaaaagagcagggctactgcgtggaacaagtcggtttgttgacgatgcgcaaggtgatagaagagccttacgagatcgagctggattacgcagaagaaggttatctttctatgatgggaagaacgttgaaagaaggcagatatccggcagaggaaggagaagcggcgctggatgaatttacacttcggaatctggatattccgagggagatcggcacgacatttacattggatggagaaacatttacgttgtgcggaattgtgtcagagcagccgtctgctcttacgcagcggatgcaggtatttgtggatccgacacgggattatgggacaaatgggagatttctgtacgtgaaatttgaggaatccaaagatatttacaggcagatgagcgcatttgcagatacatttggaatttccaaaaaggaaattgcggcaaactgggagctggtggaatggctgaaaaatggaacccgtatcaatgcggcagaagcagtgaagaccgggattctccactggaaggaagcgggattgccttatatctgggggaatctggacgacaagtggaatctgaaggataaagcggtgctggcagcgataggagtattcggaacatttgtgatctacagtctgtttcaggtatcagtacggaaaagaatgtcacagtacagtgtcatgcagacactggggatggagtcaaaatgtacgtttggtgtgctgacaagtgagttgtggatgatttttgcagtggcttatccggttggatgtgttctcggaaatgcagcagcatgggggatttatcagaaaatcggcagtatttttgtacggacaaagggaattcagcatacgaatatgtatgtcgcagcagaggcggccagagaggctgcacaggcaggacgtgcacaggcgggcgcatttcaggtttcaggagaggcgattttctttggagcggtctttctgctgtgcctgcttacatttgtaagcttgattttagtgaggcggatggaaacgctgacactgcgggaaatgataacaaaagaaggcgaagcacagacaaagagacgtaagatctacagtctgaaacgaaaggatctgacgggtgtcctgacaaagaagtttatgttttcgagaaagaaaacttttatcggaattatattgtctctgtctgtgggaagtgttctttttttagggactgcctatctgacagaaaatgcaaaggtcaacaatgaactgacattcaaggcagatgacggacttggttcggatattcaggtgtatgaagattcagattcactgtccggtctgattccaaaggtatgtgcagagcagatggaaaagataagcggattggagtctgtcagaccggtgcggtatatggcgggagagcttacgatgtcagatgatgtttttcactggccggagtattatatgggcagtgagaatccggaggaaaacattctggatgcagattcggatatggtggaaaaattcaatggaagactggtgagaaaagcaaacggagaatatggattaaaggtcaatatctacggatatgacgacaggatgttaaaggagttgaatgactatcttctggagggagagatcgatccggagaaaatgcgggaagaggatacggtgatactggcgacgctgatggacggacagggaaattatgatggaatcagtgtgtctcccggagatgcgctttcagtaaggacaccgaagactgcggatacacagacagaattgctgaaatttcaaggggaagactctctgtatcagaattcaaattttcaagtccaggcagttgtcagcagaacactggcaagagtggatcagttttacggggatggagcagccagcattattatgaccaatgaacagatgcagaaatattttggcatcgaaggataccggaccatcagcattgcattgaaagaacatgcgaatgcggtcgcagtgacagatgagatccgcaaggttgtttccggagtatccgactgtgtcgtcaaggattatacggaacagatcaaggtacagaacttttatctgaatcagaaaatgctgttcttctatggaattgcgcttgtccttctggtgatcagccttctgcatattatgaacagtatgcagtatctggtggcagccagaaagcatgaattcgggattttaagggcgatggggatcacggattccggttttcggatcatgctgctcaaagaagggctgcggtatggagtatattccagtattgtgatggtcgcactttatctggcggtacaaaaagtgttatactattttatgacacatgtatttttgtatctgcatccaaaatcaggtattcagattgtgccggttctgatcatgatcctggtgaacctggcaatctgtgcagcggcagtggtgatttccggacagtctgtgctgaaagaacagatggtagatgtgatacgggagtagacaggaggaaaacacatgacacatgtctttgaaggagaatttgtacatcagaatctggggagaatcaggaaggagtttcgtgttgatcagatgtgcgagtgggaaacacgaaaagctacagtcagaggactctttttttgtgagcatggaattgtgatcgatacttgtgaggagctggatcatctggatgaacaggtgatgcaatatttaaacattacgttgagagaaaaagatacacaggttatccctttttgtgcagacggaacgtattgggtgccggtggaagcgggagaagcaaaggatgtgcgggctgaaaagtggatggaatattatcagtgtgatcaagaacgattctggaagtttcaaagatatttctatgaatggacaggagaaattccgaagaggttggagttaagtgtgaagccggaaaaaacgcggtacgaaggaacgtcttttgcagtcaaagcgggggctgtcgatcagaaagtggaagtcatgcatccggtgacaaaagaatactatgaactgaatataaaagaatccgttgatgagaggatcgaggttccggatatggaaggtctgaaatttccggagcatgttttgaagattacgtatgaaattgcaccacagccaaaggatgatttttatctgcaggatcgtgaagaaggggacaccgtttggacgactgcacatggtaaaagatcggtatctgtaatcggcggtcagtctggtcccacatccgtttttctggcggggacgatagaacccggtgatcaggcggcgtattcatcccctcattttcatccggtgaaagaaacaatctggaaaccggtattttacaggcaggagcttgaagaaaaatatctgagcatcaggttggatagatcgtgtttgaaacagtggtaaaatttcctaaaaaggacagtctttttcttacgatacagtcaaaacgacaaaatgaaaaaagaaggtaagaaaaggagaaaaatatgccaaagcataagagagaaagtttgatttatacggtaatgatgtgtttcgtgacggtactctggatgagtgtttacaacgtgacgctgcatatgggacaattcggtgtggagactttaaaggaagcatggcttggcttcccggtggcttatatttttgcgatggtgtttgactggtttgtcgtatcagggccggccaaagcattcgcgttccagtttctggttaaaccggacagcagtgtgcttcaaaaggtgatcgctgtttccagctgcatggtaatcccgatggtgatcattatgtcattttacggaggtgtggaagcctgcgtaaaaagcggagaatggggaagcttacttctgatctggctgaccaatattccaaagaattttattatggcacttccattccagctgttgatcgccggtccgttggtaagaaaagtatttcgaaccgcatttccggagggaaccgtacttttaaaagcaaatatctgaatgtaagcaatatcccatgaaacaagagaaagttatggaaaatatatatgtatttgacgatggagtgatcagaggattcattgagatgaacgggacacaactgagtaaaatatatgtggattcattttttcagagtcagggagttggtgatgcactgatccgatatgcgacagaagaatttggtgcagacaatttatgggcattggaaaagaataaaagagcaatttcgttttatcaaaatcatggatttcaagtgacaggtaggaaaagactggaagaaaatacaacggaatatcttgtaaaattagaaagataagttttggacagaagcagaaggcgaaatgccttctcttttttaaatgaaaaaataaacagtatacaacagttgacaacagatgcaaactgttatatactgtttataaataaaggaggcacatatgaaaattataatcaacagttcatcgatggtaccgatctatgaacagatcgtagaccaggtcaaggcacagattataagcggcgagctgaaagaagatgacaatctgccgtctgtccggaccttgtcaaaagaattgaggatcagcgcactgactgtaaaaaaagcatatgattctctggaacaggaaggatttacggttaccatacacggaaagggcacctatgtggctgccgccaacaaagagatgatgatggaagagtatcgccgggaggtggaagaagagctgaccgaggtgatacgcaaagcaaaaagatacggcctgtcggaagaggatatccgggagatgctggagctgatattggagggatagcatatgctgaagttagaacaggtaaagaagcagtataaaaattttacactggactgctcactggaagtcagaccgggatgtattaccggactgatcggacagaatggagccgggaagtccacgacatttaaagcggctctgggactgatccatacagatggaggaactatggaagtgttcggaaaaaacagccgggaactgacggaaaaagaacggcagaagttgggagtggtactttcggatgcaggattcagcgagtttcttcttggaaaagatgtggtatctgtgatgcaggccatgtatccgaaatttgagaaggaaagatttctttccagatgcaaggaatttcagattcccatggataagaagatcaaagagttttccaccggaatgaaagcaaagttaaaagtgctgcttgcattgtctcatgatgccagtctgctgatcctggacgaaccgacagcagggctggatgtggcggcaagggaagaggtgctggatcttctgcgggaatatatggaagagaaggagaatcgtgcaatcttgatcagttcccacatttccagtgatctggaggggctgtgtgatgatctgtacatgatccacgaagggaaaatcgtgctccatgaagaaacagatgtgcttctcggggagtatgcggttctgaaagtcgatgaagcccagtatcagacactggataaacaatacattctctgtcagaagaagacgccgtttggacacgaacttctgacagaccagaaacagttttatctggaaaactatccgaaagttgtcgtggaaaaggggacggttgatgaagcaattttgatgatgatcaagggggagagagtatgaaaggattgctggtaaaagacgtctgcattttgaagatgcagaagaatgtattgctgattttattggcgatgtgtgtggtgtttactgtttttttggaaagtccgacgtatattgtgagtctgatgcccatgtacggctgcatcgttgtcttgggaacattgagttatgatgagtttgacaggggatattcctttttatttacactgccggtatcgaaaagaggatatgtaaaagaaaagtatgtgcttggcctgctcttttgcggcgggatctggcttctttccgtgttaggcagtctggtctatgtgtgtatcaacggggagataccaatcgatgtgtcgttgtttctttcctatgcaatgccgtttgttttggtattgattttgttgggagtggcacttccggtacagttgaagtgtggaaatgaaaagggcagactggcggtggtagcggtaggacttggagcttttctgttgatcgcaggattcggtcagctgatcaaatggctccatatcgatgtgaccgctgtcttagaaaaagtgtcagagattggtgtgggtacacttggggttatcggtttggttgtgcttgttgtttttatgggaatttcgtatcaggtcagtgtgcacgtgatggagaaaaaggaattttagaaggtatcacaagatggagtggttttttgaccactctatttttatgagaaatatttgggaaaaagaaagacattttccccattcaatgataaaatgggattgtctgataaaaataatggaatgataacaggaaaggcggagcagtatggaaaattttaatttttgtgttggtaccagaattttatttggaaaaggacaggaagaaaagctgccggagcttttacgcccatatgggaataaggtactgttgacatatggcggcggaagtatcaaacggacaggactttatgacaggattaaaaacctgcttcatgagtttgagatatttgaacttggcgggatcgagcccaacccaagaattgagagtgtgtatgccggggcggaaatctgcagagaagaagacatcgatgtgatccttgcagtaggcggaggaagtacgctggactgttccaaagccattgccgccgcagcttattatgaaggagacgcctgggatctgatcctgcatcctgacaggattgaaaaagcgctgccgcttgtcaccgtgctgacgctttctgcaacaggaagtgagatggataatggcggagtgattaccaatctgaagacgaaagaaaaactgggctttggaaatccgctgttgcttccgaaagcttccatcttaaatccggagaatacatttacagtacctgcaagccagacggcagcaggcagtgcagatattatgtcacatattctggaggtgtatttcgataccagaagggcagcagttccggatcggatcagtgaaggtcttttaaaaacggtgatccagtatgcgccgatcgcagtgcgtgagccggaaaattatgaagcacgtgcagagttgatgtggacgtcttcgctggcaatcaacgggacctgttccacaggaaagggctgctcatggagctgtcatccgatggaacatgaactgagcgcctattatgacattacacatggcgtggggcttgcaattctgacgccgcgctggatgcgttatatcctgaatgaagataccgtagagaaatttgtggattatgcaaaaaatgtatgggggattgcagaatctgaagatgtatttgagacggcaaatgcaggaattgatgcgacagaaacatttttgaaaaatttgggaattccgatgacgctgacagaactggggattacagaggagcattttcaggcgatggcagagcatgccgtgatttttggaggccttttggaggcgtatgttccgctgaatgcaaaagatgtggaagcaatttataagatgtgcctgtaatcattccgaaagaaggaggagatgacaatggagacattacaattgagagatgatttttactggacaggaattgtggacgatcagcttcgggtgtttgatatcattatgtatacggagtttggcacaacctacaattcttacattttaaaggcaggggataagacgatcctgttcgagacggcaaaagcaaagttttttgacgaatatctggaaaaattaagtgagatcacggatattagaaagatcgattatctggtagtcaaccacactgaaccggatcatgcaggaagtgtagagcggcttttggagctgaatccgggattgaagattattgccacaggatgtgccatcggatttttaaaagagatcgtaaacggggaatttacggcgattccggtgaaagacaatgagaccatgaagataggcaataagacgctgcggtttttgatcgtgccgaatctgcactggccggatacgatgtacacttatatagaagaagagcagattttagtgacctgcgattcttttggttctcattatggattccatgatattttgttaagcaaggtaacacagtgggacgattatgtgcgtgccacaaaatattattttgacaatattatcggaccgtttaagccatttatgtctaaagcactggcaagagtgcgggagttggatctgagtatgatctgtaccggacatggaccggtgatcgatgacaagatttcgtggatgctggatacttatgaagagtggtgtactgtcgtgaatccaaatccgaagaaaacagtgatcattccgtatgtaagtgcttatggatatactgcccggcttgcgcagaagatcgcagaaggaataaaggccagcggagatatagatgtgcgctgctatgatatggtagaggcagatcaggcaaaagtgctggaagaactcggttttgcagacggaatcctgtttggaacacctaccattgtgggagaggcgcttaagccaatctgggatctgacgacttctatctttgcagggacacatggaggaaaactggccagtgcattcggcagttatggatggagcggggaaggcgttcctcatataatcgaacgattgaaacagctgcggatgaaagtagcagatggatttcgtgtgcggtttaaaccgggcgaggacaatctgatcgacgcatttgactatggatataatttcggatgtatccttcagaataaagaaaataaaagagtagaaaaaagtggtgcacgtcagcttgtaaaatgtctggtctgtggagaaatctttgattcttcactggaagtgtgtccggtctgcggagttggaaaagaaaattttgttccggtggatgtacaggaaagtgatttctccaatgatacaaaagatttctatgtaattcttggaaatggaactgccggctggaatgcggcaacagaaatccgaaagagaaacaaaacagcatcgattttgatgatttcaaatgagccatatcgtacctataatcgtccaatgttgacgaaatctattatggcagagttggatgaggagcagattgcagtacagaatgcagaatggtatgaggaacagaatattcagcaggttctggatatggaagttgttgcgatccatccagagacaaaagaaatcgagctggaaggcggtttaaagtttgtttatacaaagctgatttacgcattgggatctgagtgtttcattccaccaatcgcaggagtggaaaaagaaggtgtgatcgcgatccgccgtttggatgatacgaaaaaggtagcgtcaatgctgccggatgtggagcatgttgttgtgatcggaggcggagttctgggactggaggctgcctgggagttgaagaaggccggctgtcaggtgacggttctggaagcggcttgtcagttgatgggacgtcagcttgacgacgcggcaggtgagatgctcaagcacatcagcgaacagcagggcgtgcagatttacacaggtgtcagcattgcttctattgacggtgaagacaatgtgacaggagtgactttgacagatggaagaactttcccggcagagctggtgattgtatctgcaggagtccgtgcaaatacggcgctggctaagacagccggaatcgaagtggaccgtgcggtgatcgtcaattctaaaatggagacgaatgtgccggatatttatgcatgtggtgactgtgcacagtatgacggtctcaactatgcaatctggccggaagcatctgaacagggaaaagtggcaggagcgaatgcggcaggagaagagatggaatatgagacagttccggcggcactgagcttccacggaatgagaaccgcattgtttgcagcaggagacaacggaaagaatccaaatctggtatacaagacgattgaattgaaggatatgggcaaaaaacagtatcagaaatactatttcctgaacaaccgtctttgtggcgtgatcctgatcggggatgtgagccgtatggcggagatgacacaggcactggaagagcatgtacagtaccaggagttaaaattgtaagaaacagaataaaaagataagaaaaagtgcagagcgaaaaagagctctgcactttttgtgcattctctgacggtcagagagacagattattcaccgaagaaaaggcgcatatcgtgttcaactgtatcaattcctgaaatctggaaattttcgatcaaaagcttcgttacattaggacttaaaaatgccggaagtgtaggtcccagatgaatatttttcaccccgagggaaagtaaggcaagcaggacgatcacagctttttgttcataccacgcgatattgtaaataatcggcagctcattgatgtcatttaattcaaaaatttctttcagtttcagagcgattactgcgagggagtaggagtcattgcactgtcctgcatccagaacacgtggaattccgttaatatcacccagattcagtttgttatacttatatttggcacagcctgccgttaaaatgacagtgtcttttgggagcgctttcgcaaaatccgtgtagtagctgcggctttttgcacgcccgtcacagcctgccatcacaacaaatttccggatcgccccggatttgacagcagaaacaacctgatctgcaagagcgaaaacctgtgcatgggcaaatccaccgataatttcaccacgttcaatttccaaaggcggtgcgcagtgttttgcctgttcgatcagcttggagaaatctttgtttttttcaggtatgtcgtcaatatgctgacagccgggaaatccagccgcaccggtagtgtacaggcggtctttgtaagtgtcctttggaggaacgatacagttggttgtcatcaggatcggtccgtggaaagactcgaactcttctttttgtttccaccatgcatttccatagtttcctctgaagtgagaatattttttgaatgcaggatagtagtgtgccggaagcatctcagaatgtgtatagacatcaattccggttccttcggtttgctcaagaagcatttccagatctttcagatcatgaccggaaatcagaatccccggatttttaccgactccaatattgacttttgttatttccggatttccataggcttctgtatttgcctgatctaaaagtgccattccggaaacaccgtatttaccggtttcaagtgtcagattcaccagatcttccacggtcagggtatcatccagcgttgctgcgagagcgcgttggaggaaggtatccagttctttatcttcttttaaaagaacattggcatgtctggagtatgcagataatcctttcagtccgtaagtgatcagttcacgcaatgaacggatatcttcatcctttgctgataaaactcctacagtggcagctttggctgcaaattcagaaggggctgcagaccatcgggcagcctccggcaatttttccggatttttcagttgtaaaagaagcacttttttgatctgaagtgtcttttcaatctgggaagtgatcatttcgggatcaaaattggcatttgtaatcgttgtgaagagatttttggtaatcagctgattgatttcaccggtcacgtttaaatcttcccggcgcatctgcgttgtcactgcagataatcctttcgtcacccagacaagcagatcctgcagagcggctacgtgtggtgtttttccacatacgcccatttttgtgcatccggtacacccggctgtttcctgacattgatagcaaaacatattttgttccattttgataatcctcctgtggtttcaataaggttcgaagataaaaatttcgaatagtgtttcaagttatgggaggattatagcgcatggaacaaggaaagtatgttgttataacaacgaaaaagagaaaatgtatatagaaatattggggagctaagatcttatcagaaaagattttaaggagacgttagaacatgtgttacttgatagcgaaacagattgattaggtcggctgtgttgcatggaaaacaacgtatggagagtatgaaccagatcattttgttggttcagaggcagaatttgaaaaaggagttgtaaatatgtaatagaagttatagtgaaaaagtatagcacagtacagaacaaacattcgattttgctctgtacttttattttatattttgatataataacggcagggaataagtgtgagcaaaatatgcctatactgataaggagaaaatgtggatcactttgaattagtatcagaatacgcctgcttatcatagtgaacaataaaaaccttgccgtgcagctttacggtgagtttaaggagtccttcccggagatcgcggtggaataattcgtgagctggaatgtcagggggaaaacgagtgctatttggtgctttagtaccgaatagtatggatttttcggatggaatgattattgtccgatgtcagaggaagagattatagagttttgcgaagattagagtaagaaaaatgaaaggatgtgaatagatggataacattcaaaaggaaaatttttataataaagtaatagagttattccaaaatgcaaaaaaaaaattatcagttgcagtaaatatgacgatggtatactcatattatgaagcagggcgaatgattattgaagaggaacaggatggaaaagaacgtgcagcatatggaaagtacatattaaaagaattatcaaagaggttaacgcaaaaatttgggcgaggttactcgtatgataatttaaaattgatgagaaaattttatctggtatattctaaagattcaattggggaaacggtgtttccccaatctgaaaacttgccgactacaaaagaaggaagaaaattttatttgagttggtctcattatcttattttaatgagaataagtaagattgaagaacgtcatttttacgaaatagaagcatatagaaatggctggagtaaagatgaattggcacgtcagtatggtagttcgctatatgaacgtttgtcattgagcagaaataaggaagaagtaatgcgtcttgcaacagaaggacaaatgcttgaaaagccagaagatatattcaaagatccgtatattttagagtttacaggacttccggaaatggttacttattctgaaacggaattggaaaatcgaattatagataatttgcagaagttcctattagaattagggagaggatttacatttgtaggcagacaggttagatttacatttgaagaagagcattttagagttgatttggtgttttataatcgtttattgcgttgttttgtattgtttgatttgaaaattggccagttaaagcatcaagatataggacagatgcagatgtatgtcaattattatgaccgaaaagttaaattggacgatgaaaatgcaacaataggtattataatttgtaaagataagaaggatgctattgtagaaatgacattgcctaaggatagtaatcagatatttgcgagtaaatacgaaacggtacttcctagtaaagaagaattacaaacagtgttggaagacaaaaattttgaataaataaatgatgaatactcgacggagtattttgcattccgttacgaatatatttgaaaatgtggctgacagtaagcatacgaaaagtcacacatggaggattttgctatggatagattcattttgaaagccccatataagccaaccggagaccagccacaggcgattgcagagcttgtgaaagggttcaaggaaggcaaccaatgccagactttactgggggttacgggttctggaaagacttttacgatggcaaacgtgatccagcaattacagaagccgacactggtcatcgctcataataaaacacttgctgcgcagctctacggagaattcaaggagatgttccccgagaacgcagtagaatattttgtctcctactacgactactatcagcccgaagcctacgtcccatcctcggatacctacatcgccaaggattcagcaatcaatgatgagattgataagctgcggttatctgctacgatggcactggcagagcgcagagatgtgatcattgtggcgagtgtttcctgtatctatggactgggaagtccggtagactatcagaacatggtgatttctctgcgtccggggatgatcaaggacagagatgaagttgtagcaaagctgattgagattcagtatgacagaaacgacatggactttcatcgtggaacattccgggttcggggagatgttttggaagtgattccggcatatgagtcagacgttgcgatccgaattgaattttttggtgatgaagtggatagaatcacagaggtggacattcttacaggagagatcaaagacgagttaaagcatgtagcgattttcccggcatctcattatgtggtggataaagagaatatcaaccgcgccgtcaaggcgattgaagaagagctggaagagcgcgtcaaagaatttaaaagacaggataagctgttagaagcgcagcggattgctgagcggacaaattttgatattgagatgatgaaagagacaggattttgctctgggattgaaaactattcccgtcatctggcaggattggcgcccggacaggctccatatacactgattgattatttcccggatgattttgtaattatgatcgatgagtctcataagacgattccgcagattggaggaatgtattccggggatcagtcgagaaagtcgacgttggtggattatggattccgtcttccttctgcgaaagacaaccgcccgttgaattttgaagagtttgaaagtaagatcaatcaggtattgtttgtgtcagcaaccccgggagtttatgaagaggagcatgagcttctgcgggcagagcaggtgattcgtccgacagggcttttagatccggaagtagaagtgcgtccggtagaaggtcagattgatgatctgatcggtgagatcaatcaggaaatttccaggaaaaataaagtgctggttacaactctgacaaaacggatggcagaggatctgacagattatatgcgggaaatcgggattcgcgtaaaatatttgcattccgatgtggatacattagaacggacggagatcatccgtgatatgcgtctggatgtatttgatgtactcgtgggaattaatcttttgagagaaggtctggatattccggagattacgctggtggcaattctggacgcagataaagaaggatttttacgttccgagacttctctgattcagacgatcgggcgtgcggcacgaaattcggaaggtcacgtgatcatgtacgcagacaaactgacagactcgatgcgtctggcaattgatgagacggaaagacgacgcaagattcagatggcatacaatgaagaatatggcattacgccaaagaccattcagaaggcggtccgcgatcagatcagtatttccaaaaaagtagcagcagaagaactgaagctggagaaagatccagagtctatgagcaggaaagaactggagaagttgatcggagaagttacgaagcgaatgaagaaagcggcagcagagctggatttcgaatcagcggcagaattaagagataaattgattgagctgaaacagatattgaatgagatcgaataattatgatataaatgggaaaggaattttacatgggaaaaaagatggacgccagacagtatatcagaatacgcggcgcgaatgagaataatttgaaaaatatagatgttgacatccccagaaatgaactggtagtgctgacaggactgagtggttcgggaaaatcatccctggcttttgatacaatttatgccgaggggcagagaagatatatggaatcgctttcttcctatgcaaggcagtttcttggtcagatggagaaaccggatgtggaaagtatagaagggctttctccggcgatttctattgatcagaaatcgaccaatcacaatcctcgctctaccgtgggtacagtgacagagatctatgattatttccgactgctctatgcgagaatcgggattccacattgtccgaaatgcggaaaagagattaaaaagcagacggtggatcagatggtagatcaggtgatggcacttccggaaggtacaaagatccagttgcttgctcctgtcgtaagaggcaggaaaggaacccatgcaaagctgtttgaacgggcaaagaagtcaggatatgtgcgtgttcgtgtagacgggaatctgtatgaattgtcagaggatatcgcactggataaaaatatcaaacataatattgagattattgtagaccgtcttgttgtgaaaccgggaattgaaaaacgaatgacagattccgtggaaagtgtactttcacttgcggaagggcttctgatcgtagatatcatcggcggagaaccgatgaatttcagtcagagtttttcctgcccggactgtggaattagtattgaagaaattgagccgagaagtttctcgttcaacaatccgtttggtgcctgcccgacttgttttgggctgggatacaagatggaatttgatgaggatttgatgataccggatccgacactcagcattcagcagggagcaatcgcagtgatgggctggcagtcctgtacagaaaaatcaagctttacacgtgcaattttagatgcgttgtgtgaagaataccattttgatctggagacgccgtttcaggactatccgaaagagattcacgatgttttgatttacggaacaaacgggaaatctgtgaaagtacattacaaaggacagcgtggagaaggtgtttatgatgtggtctttgaaggactgatcaaaaatgtggagcgccgctatcgcgaaacggggtctgagacaatgaaggcagagtatgagacttttatgcggattactccatgttccgaatgtaaaggtcagagattgaaaaaaggttctcttgcggtaactgtgggagagaaaaatattgcagaactcacagcattttcaatcgataagctgcagaaatttttacaggggctggaactgacagagacgcagctgctgatcggagaacagatcttaaaagaaatcaaagcgcggattcagtttttgctggatgtaggactggactatctgacgcttgccagagcgacagggacactgtccggcggggaagcgcagagaatccggctggcaactcagattggttccggacttgttggtgtggcctatattctggatgaaccgagtatcggattgcatcagcgggacaacgacaagttacttgccacattgaagcatctccgcgatttgggaaattctctgattgtagtggagcatgacgaagatacgatgctggcggctgactgcattgtggatatcggtccgggagctggagagcatggtggacaggttgttgcagtgggaacggctcaagagttgatggcaaacgaaaaatcagtgaccggagcgtatctgagcggacgcctcaagatcccggttccggaaaaaagagagaaaccgaccggatatttgaaagtagtaggcgcaaaagaaaataacctgaaaaatatcaatgtcaagtttccgttgggaatcatgacatgtgtgacaggagtgtccggttccggaaaaagttctcttgtcaatgagattttatacaaaacacttgccaaaaaactgaaccatgcaagaacaattccgggaaggcatacgagaattgaagggctggagcaggtagataaagtgatcgacattgatcagtctccgattggaagaacaccgcgttccaatccggcaacatatacgggtgtatttgatttgattcgtgatttgttcgcagcaacaccggatgcaaaagcgagaggctataaaaaaggaagatttagcttcaatgtgaagggcggacgctgtgaggcctgcagcggagatggaatcattaagattgagatgcatttcctgccggatgtatacgtaccgtgtgaagtgtgtggaggaaaacgctataacagagaaactctggaagtgaaatataaaggaaagacaatttatgatgtattgaacatgacggtggaagaggcgttggaattttttgaacatgttccgagtatccggagaaaaatggaaacactcaatgatgttggtctgtcttatatccgactgggacagccatctacgacattatccggaggagaagcccagagaatcaaactggcaacagagttaagccgcagaagtacaggaaagacggtatatattctggatgagcctacaacaggactacattttgcagatgtgcataagctgacagagattttgcgacgtttatcaggtgacggcaatacggtgatcgtgattgaacataatctggatgtgatcaaaacagcagattatattatcgatattggtccggaaggcggagataaaggtggtacagtcgtagcgagcgggacaccggaagaaattgcagcaaatgagaaatcgtatacaggcaaatatattgccgcaattctgaataaaaaataaaaatgtgcaaaaggggtttccaagtgaaataaattttattatacttaactatgcgagtatctgaagccgaagagaagacagattataaatgaactgagaaatacaaaagaggggaaaaagaatttgtaaggctggaggagaaaagatggctgtagatatcggaatagatttgggaaccgcaagtgttcttgtatacgtgaaaggaaaaggggttgttttaaaagaaccatctgtagtagcgtttgacagagatacgaatgtaataagagcgatcggagaggaagcacggctgatgttaggcagaacaccgggcaatattgtagcagtacgtcctctcaggcagggtgtgatctcagattatacagtaactgaaaagatgattcagtactttgtaagaaaagcaatcggaaaaagaacgtttaagaagccaagaatcagcatttgtgtaccgagcggtgtgacagaagtagaaaaaagagctgtagaagaagctgcgtttgcggcaggagcaagagaagtacatctcattgaagagccggtggcagcagcaatcggagcaggaatagatatcggaaagccatgtggtaatatgatcgtggatattggaggcggaactgcagatattgctgtaatttcgctgggtggcgcggtcgtgcatacctcgattaaaattgccggggatgattttgatgaagcaattgtacggtatatgcggaaaaagcataaccttctgatcggggagcggactgctgaagatattaagatcaaagtcggcacgacatatcctctgattgaggaagagagtatggaggtcagagggaggaatctggtgacagggcttccaaagacggtaacagtgacttcctcggagacagaagaagcacttcgcgagacatcagggaagattgtggaagcggttgtttcggtattggaacagactccgccggagctgtctgccgacattctggatcgggggattgttctgactggcggtggggcaatgctgcgaggtctggaagagctgatagaggaaaagacaggtatcaatacaatgacggcagaagatccgatgaaagtagtagcgatcggaaccggacagtttgtggaatttatgagtggcaggaaggatttctgagaagaaatcaggatgggacaggctgcttcggcaacagaatgaagattctgtatgtcgggggagtctgtcttctattgtaggactgttaaacagaaaaaatatgcaagaatacatgtatacaatgttgaggctgcataaaatgggaggaagaagtggagattgtaacaggatacgtggaacatattgtgtttcgcaatgaagaaaatggatatacagtatttcagctggaaagtgaagcgggcgaagtaacctgtgtaggaaccctgaattttatcagcgaaggagagcgcctggaaattaagggagattatgtgaatcacaatatttacggaagccagttgaaaatcagttcttacgagatgaaggaaccggaagatctgatctccatagagcggtatcttggttccggtgcgatcaaaggagtcggtgcaactctggcaggaagaattgtaaggaagtttaaaacagacacctttcgtattatagaagaagagccggaacggcttgcagaagtgaatggaatcagcgaacgcaaagcaagggagatcgcgctgcaggtggatgagaaaaaaggaatgcgcaaagtgatgatttatttacagaactttggaatcagtacagcactggcagcaaaaatctatcagaagtatggcagtaaagtgtatgagatcctggaaaccaatccttacaaacttgcggatgatatcgaaggtgttgggtttaaaactgcggatgagattgcggcaaagattggaatacatacagactctgatttccggatccaaagcgggattttttatgtgcttcagcagtccatgacagaaggacatgtatatttgccgaagaatgttttagaggtaaggacctccaggcttcttggtgttgagattgaaggaattgaaaaatatatcatggatctttgcatggaacgaaagacagttatgaaagaaatagaaggagagatccgtatctacccgtcccgcttttattatatggaactgaatgttgcccgtatgctgaatgatctggatattgactgcgcgatgccggaagatatgatggaaaaacgactgcgaaaagtggaggagctggaacagatttcactggatccaatgcaacatcaggcggtgatcgaatcgatcaagcatggacttttgatcctgacaggaggacccggaaccggaaagacaacaacaatcaacaccatgattcagttttttgagagcgaggggatgagtattcttctggcagcgccgacagggcgtgcagcaaagcgcatgacagaagcgacaggttatgaagcgcagacgattcatcgtctgcttgaagtcagcggaaatccagaagaagaaggaaatgtcaatggatttttaagaaatcgcgacaatccactggaaacagatgtgctgatcattgatgaaatgtccatggtagatctgaccttgatgcatgcactccttacagcagttgtgcccggaacaagattgattttggtgggggatgtcaatcagctgccgtcggtaggaccgggaagtgtattaaaagatacgattgcatcgaataaatttcatgtggttacactgacaaagattttccgtcaggcgggagaaagtgatatcgtactgaatgcgcataagattaatgcgggtgagcgcgtgatcataaataacaaaagtcgtgatttctttttcctgaagcgacaggaggcggatgtgatcataggagttgtgatcacactgatccagaagaaacttccgaaatatgtggatgcatctccgtttgatattcaggtgatgacaccgacaagaaaaggtctgcttggagtagagcgtctgaatgtgattttgcagagatatttaaatcctccggatccgaagaaggaagaaaaggaagcaaacggaaggattttccgtaccggtgataaagtgatgcagatcaagaataattatcagctggagtgggaagtttgtacaaagtatggggtgacggtagataaaggaatggggattttcaatggggatatgggaatcatccgggagatcagctcctataaagaaactctgactgttgagtatgatgagaagcgacaggtagaatatccgtttgagctgttggatgaactggaactggcgtatgcgatcacggttcacaaatcccagggaagcgaatatccggcggtggtaattccgctgcttccgggaccaaagctgttatataatcggaatttattgtatacagcagtgacaagggcaaaaaaatgtttaacgatagttgggagtgaagatacatttcaggaaatgataaaaaacaaaaacgaacaggaacgatacacaagtttggacgagcgtatacaagagttttagagctgttgtacccttcagtttgtccattttgcgaaaatgtatacaagtatggaatctgtccttcctgtaaagaaaagatcgtgtatatccgtcagccaagatgcatgaaatgcggaaagccattgagaaaggaagagcaggagtactgccgtgattgccaaaaaaagaagtatgcgtttgaagccgggaagagtatctgggtgcataaagcaccggtttcgcagggaatttacagatttaaatacaaaaacagaagatgttatggagaaatttttgctgcggaaatggctgcagaattaggagatgctgtgaaacaatggaaaatagaagaaattataccagttccgcttcacagatccagacagaggataagaggttacaatcaggcacaaattctggcggaagaacttgggaaaaggctggatcttcccgtgaacaaagatgcagtaaaaagaattcagaaaacgcgacctcagaaagtgcttgggagcagagacaggattcgaaatctaaaaggagcatttggtgtcacaaaatcctggattccgaaaaaatgtgtgctggtcatcgatgatatttatacaaccggaaataccatacacagagtggcaaaggtgttgaaaaatgcaggagcacaaaaagtatattttttgaccataagcattggacaaggactctgacagtatgatatactaaaaatgatgtttaaaaggcaatggatcgaggtggaaacatgttggataaaagaaaaatacgattgatgatcaagatggcttcttatgaaaagcagggagcagaagaggatctgaaaatcagcagttattataaaaaggattatgtgagtatgaatgtgtgggctacggcaatctggtttaccatcggttatgcaatcgtagcggcactgatcgcattctgcacgttggagcagattctggaaaagcttacgatactaaagcttcttctcttgatgggaacggcagtaggcggttatctgattcttttgattctttattgtaccggtgcaaggatgttctacaagagaaaacacaatcttgccaagcagcatgtgaaaaaatattatcgggatctgtcccgtcttgaaaagataaacatgaaggagaaaaaataatatgagcacattacttgtatggaaggatcagatagaaaaaatttatgccagatattctttttatattgtaaagatactgcagttcgtgttgggattatgtgtattcggactgatcaattccaatataggatttatgaaagcattatcctctacagtttgtacagttggtcttgctgctgttacggcctttcttccggtcgggatgctggcacttgtagcagccctgcttgttctggtacatctgtatgcactgtctttgccggtagcgggattatgtctggcaatttttctggtgatgtatattttttatgtaagatttacacctaaaaaatcatggctggtggtagtggcggcagtagcagttgctctgaaggtcccatatgtgatcccggttgtatttgggttgctcggagcgccttcatttgcagtttcgatgatgctggggacgattgtttattatatgctccacacagtaaagctgacggcatcggcatttcagagtggaggggtaaaagaacttctggatggaatcatggtatttacaaaacagatactggccaacaaagagatgtggatgatggtagttgttctgctcctggcgatgatggtagtatatggggtgagaacaagaggcatcagtcatgcgtggaagacagcttccgttgcgggagcaatcgtggcggcagtgcttcaggtgtcaggctgtatgacattggatgtttccttccaggcaagttttattttactggatcttgtggtgacagtagcagcaggtctgatagcagaatttttcttcctttctgtggattattcaagaacagagacattacagtttgaggacgatgagtattactactatgtaaaagcggtgccgaaagtaggggttacattacctgaaaaacaggtgaagcatattacagagcctcatgaagaacagccaaaggaagcaaaagcagcagtaaatctgaagccggagccgatggttcaggaaacggtggcgattgatacgagccagatccaggaagcagatctggagaaaaatgtagatgaacttctgctgacgcagagtttaaatgaagaattgagacagaatcagaacgagccggaggatgacttgagtcttacgaaaagtcttggagatttgtggaccaagaagcctggttctggagaataggatgaggaggtgactggatggaagaccggatcagaatttttttaaacaattacataaatggtttatactttccaacggtacacctgacagatgtgatagagatattgatcattacagtgatcgtgtatgagatcatgctgtggatcaagaatacaaaagcgtggatgctcttaaaagggatgatcatgctgggggcattctttttgcttgccgcgatctttaagatgcatacgattttatttgtggcaaaggagtcgatcagcgtacttgcaatagcggcagttgtcgtgttccagccggaacttagaagagctcttgaaaagctgggcgaaaagaattttcttacgaatgttactctttttgataaaagcaaagaaaatcagcgcttttccgatgaaacccgagacgggatcgtgcgcgcatgctttgagatgggcagtgtctgcacaggagcgttgatcgttgtagagcaggcgattcatctgacagagtatgaggtgacgggaattgaactggattgcaagatctcttcacaggtattggtcaatatatttgagcataacacaccgcttcatgacggagcagtgatcatacggggaaatcggattacctcagcaacgtgttaccttcctctttcagataatatgcagatcagcaaagaactgggaacaagacacagagcggcgctcggaatgagtgaggtctgtgatgcgctggtgatcgcagtttcggaagagacaggtcaggtatctgttgcaatgggcggacaattagagagaggagtgtcaaaggagaggcttacagaacgactgaatcggattcagtacagatcagcagagaagaaagcaaaaaaatggaaaggatggcgcaggaatgaaaaagcataaatacatggaaaatctgagcttgaaagtgattgccctgttcttcgctgtatttctgtggctgatcgtgataaacattgatgatcctgttgacacacagacgtttgataatattccggtggaagtaaaaaatgagcaggttgtaaaaagtaaaggaaaaatgtatcagattttggatgggacagagaatgtaagtgtaaaagtgacggcaaagcgtgaaatactggagaaactgacatcttcagatttcagcgcggttgctgacatgcaggaaatgcagatcaacagtctgatcccgatcaaagtttctgtaaagcgatatagcagtgagtgtaaagctgaggcttcgccgaataacctggtagtggagatcaatgatgtcaaacagaaggtatttcctctgacagtcagtgtgtcaggaacgccgcagaatggatgtatcattggcaacatgactgtaaatcctgaaaagattacgatcaaaggctcagaaccgcttgtagaaagcattgaaaaagcagtggttaaagtggatgtgacgggacgcgcagattcgggaactgttcagggaaatctggtactttatgacagtcagggtaatattgtggatcagagcaagttgagcaataacctgaacacggagaagggaattcaggtagagatccagatgctgaatacaaaagacgtaccgattacatatcagcagccggagaatctgaaagagaattatatttgcacaggatggacctgtgagccgcagacaatacaagtcagcggtacaaaagagatgctggatacgatatcggagatagaaattccgacatcggaaattgatgtcagtgatgttactaaaaaagtagaaaagacagtggatatcacgcagtatcttccggagggaatcaaactggtggatgagaatgccaatacgattttgatcactgttatgattgagaaggagggttccaggattatagaattcccggtagaaggaattcaggttaataatctgaaagacaaatatgagcttacgtttgaatcagatgaagtgatcgaattgaagtttatcggagaacagacaacacttgatcagctggatattacaaatgcagtttcgattgatctgcaggactgtaaatctacaggagagtatgaggttccggtatcgattgaagtgcctgacggagtagaattggaaaaacagcctacaataaaagtaaagctgacagaaaaggaagatgaaacagatcagaaagccgataagaaatctgacagtacacaggagaaatcggaaaaataagggaggagacataaaatggtcagtggaaagacaaaaatcaagaatcctacaggactgcatttacgtccggcaggattattctgcaaaacagcaatgcagtttgcaagtaagatcacggtcagaaagcaggctcgaaatgaggaggtcactgccaatgcaaaaagtgtactgagtgtacttggggcatgtatcaaaagcggagatgagatcgaagtgatctgtgaaggctctgatgagacagcagctcttgcagagatgatcaggatcattgaggatggactgggagaataaaggttacagagcaaaggagaaaaacatgaacaaagcaacattagtcgtaatggcggcagggattggaagcagatttggcggcggaatcaaacagctggaaccggtgggaccaaacggagagattattatggattattccatttatgatgcaatggaagccggatttgataaggttgtatttgtaatcagaaaggatctggaaaaagattttaaagaagtgatcggaaaccggattgaaaaggttgtagaggttgcttacgcatatcaggaggtagatgatattccgcaggtgtatagggaacgtttttcaggtcgcacaaagccatggggaaccggacaggctattctctgctgcaaggatgttgtagacagtccgtttctggtcattaatgcagacgattactatggaaagcaggcatatgtggaagcgtacgagtaccttacaagagagacaacatcaaaggatgagatctgtatggtcagctttgttttgaaaaatacactgagtgataacggtggggtaacacgcggagtctgtaaagtaaatgaaaacggatatcttgcagatatcgtggagacgtccaatattgagaaatatgagagcggagcagccgttcacaagggagaagagtacatttcaatcgatattgaatccagtgtttccatgaatatgtggggacttacgccagaattctttcagattctggaaagtggatttgaggcatttgtagcaaataccccggcagataacttgaaagcagaatatttactgccgacgatcattggtgatcttttggcggagaaaaagcttgcagtaaaagtgttgacatcaaaagataaatggtttggtgtgacttataaagaagataaggattccgttgtttcggaattgcaggctttgattcatgcaggagtttatccgaaaaagttattctgaaagaaaaaataagagagggggcgcagcaaatcaggctgcgttcccttttgccgcgtaaaagtggtcagtataaaagttggaattaaggagaggacataagattgcaggagttaaagaaaaagcatagaaagaagccgaaaaaagagttagagagaggggcgcaaaaagagcagaagaatctgacggatataacggaagaacagttgaaagtgaatatcgggatcgttcgtctgggaaacatgataaaggtgattcagattgtgatgaaagtgctgctgtgtatgttagcagtgttgttctcatttctggcaatcttgcttcatgaagcggcaaactggatgctggcgacatggacaaatctgtctatggaggagcttgtcgctcagttaaagacaccaatccagggcaccagtcatgaggtactctgggattttgtagagacttgtataccggccgcagtgatggcagtgttttttgtggtattggtaatcgtaatggtgcgaaaaacaaagattacaaaatgggtggtacagattggagcggttgcaggttcgatggcactgattgtatcatccggacagatggtgtggaatgaactggatgttggagaatatctggaaaatcaggatacgatctcgatgtttttgcaggagaattatatggatccggcgttggttccggttacatttcccgagcagaagagaaatctggtgtacatttttatggagtccatggaatccacgtacgcttcaacagatgtaggcggcgcttttgcagaaaatgatattccggagatgacgcagctggcaatggaaaacgttaatttttcgacgggcgatatgctgggcggtctgattccttctgatggtgccacgtggacaatgggagctatggtggcgcagacatccgggttgccgctgaaggtaaagctacgcgcggagaatatacaggaagatgtgcaagtgcttccgggagcaactgttctgggtgatatgttagcggtacaaggctacaaacaggttgttatgtttggctcagaaggggagtttgccggaagaaaacagtattttgagggacatggaaattatgaagtgaaagatttgctctacgctcagcaaaacggtctcatacctccggattatcgagtgtggtggggatatgaggatcataaattgtacgattttgcaaggcgggaagtaacaaatctggctaacagcggacaaccatttaactttacgatgctgactgttgacacccattttgaagatggatatgtttgtgatctgtgccaggatgaacatccgggcaatcagtatgcaaacgtgatgtcctgcgctagcagacaggtcgtggattttgtgaactggttgaaagcacagccattttatgagaataccacgattgtgattgtaggagatcatttgacgatggacagtgatttttgtcaggatgtgccggaagattatacgcgaggtgtatataatacgatcatcaatgctccaattgttccggtcaatcagaaaaacagaatggcgacaacaatggatatgtttccaacgacaattgcggcattgggagcacagattgaaggggatcgcctgggactcggaacaaatttgttttcagcagagccggctcttgcagaaaaagtgggaatggataccctgaataaggaaattagaaaacgttctattttttatgaacagatagcaggaaaagaaaatattgatgattcagtcatggatatggactaggagaatagagaatgaaagagttttttgaattttgtagaaaaagaatagatttacttatctttaacatatccattgtagcagtggtctatggatgtagaatttttaatttgtctgttactatggataccgatctttttattaatacgcctagaagcgtttataattggttagatattggcagatatggattgatttttacagaaaaaatttttggaatacgttggtataatccttatataaactcaacacttggtttttttgcgattgttgcatttttaatgatgtttgcgtattcatttgaatatatctcaggcagagaaaatagatataattatttcgtgttttcagcactttttatgacacatccaatatgggtgatgcaatgggtgtttaaattacagaattttgatatagcaatatcaattttattagtagcgattgcagtatatcttacatttagctggattaagtgcagagcagtctggaggctattattagctataggatgtcttgtttggagttttggaagttatcaggctaacacgacactttttatagcagcggtagcatttggaattttgatatgtaaagaaaccgatttgaaaaaattgtttttggtgtgtgtaaaggcagtagtgccatttggatgtgcttatatattaaattccataattgtaaaaatgttcttttcttcaggagactatattgaaggacaagtattatggggaaacgtttctgcagagcaatgtataattaatataattcagcatattaaacaagtgttttttgtttataagcattatatatacggatatggcgcagtcgtgttaagcatatgtgctgtagttatgctggtgattcggtgcaaaagtgctataaaaattcctgtttggaaatgggtggctattttggtgttaataatcagcccgtttatgcttactgtgtatgcgggagtagcacttgcttatcgaagtcaatatactcttccttttgtaattgcggtgggatttgtgtatttaacaagaaggagagatgatgaaacggttgagaaaaagaaatctataaataaaattgtaagaaagacaatacaagcaggagtgttgatagctgcaattgcagtaggattgagtcagacatatacaacattgagattttggtatgcggatgatgtgagatatgaacaagatgtagacacattgaatgaaattgttacacgctgtcatataaaagattatgatctgcaaaaaagtaaaattgcatttatcggagagcgcaaggcaccgttgaataatgcttgttatcccgaaattgattttataggcatgtcatattttaatatgtttgcatggatggagccagaatattattattctacaggaaagatttgtacgtttgcattaacaagaggaatagagttgaatggtgcaactcaagaggaaattgcgagggctacaaattttgcaaaaaacatgccggaatggccagctaatgatgcgattcaaaaagatggcgatttaattatagtgaagatgggagaaatcaaatagaaagtcaatctataatatgttatagttaaaatagatagctttgatgaggaagaaatatggaaaagataagtgtagttgtttcatgttataatgaagaagaaagtattcctttattttacaatgaaataaaaaaagtaatgagcattatgaaagaattccagtttgaagttctttttgtagatgatgggtcaaaggacagaactcttgaagttgcaaaagaactggcaaaaaaagacgaatgtataaagtatgtgtcattttccagaaattttgggaaagaagcagcgatgtatgcgggattaagttatgcttctggagagtatgtcacaatcatggatgcggatttacaagatccgccaagtctgttgcctgaaatgatgcgttatatcaaagatgagggctatgattcggtggcaacaagacgagtgacaagaaaaggagagccaaagatccggtcattttttgcaaggagattttatcatttgatcaagaaaatttcagatacggaaattgtagatggagccagagattatcgattgatgacgcgccagttcgtaaacagtcttctggagctggaagaatacaatagattttcaaaaggtctgtatggttgggttggatataaaacaaaatggatggaatatgaaaacgtcgagagagttgcaggtgagacaaagtggtctttctggaaattgtttgtgtatgcaatcgaagggattgttgctttttctacagtaccgttgctgatttcagcgatcatgggaattgtattctgtgtacttgcgtttatattgattatcgtaattgttgcaaaaacactgatttttggagatccgacatctggatggccgtctatggtatgtattatgctattcataggtggaattcaactgttttgtatcggtattttaggggagtattttgcaaaagcatatatggaattgaaaaaaagaccgatttttatttgcaaagagacaaatattcagccataggcttttatatatagatattacgcaaaagagaaaggggttaaaacaaaagaatgaaaaaagtacagaaagtacttgcgctgttactggtgtttatgatggtgtttactacagctgggatgaatgtggcggcagctggggagatggattctgttgcaggagaagcagatatacaatcacaggagcaacagcagactttagatgaaacagacacacagcaggaggcaacacagcaggagacaacacagcagacttcggaaggaattctggagtatgtgtatgtggatgaatcagtggtcaatatgccacagacacagaatatagcagttggattttcggatgagaacctggtgctggaatctgcagttctgcattatagttctgttgttacaggtgaacagtttgaaatgccggcgtcagcaattgtgaacaatacagttttgttcacacaggattatccggaaggatcagcagaagatgtgtatcagctggatagcctgacatatcagagctcgggagtaagttctacggtaaatctgctggatgaagaaattgatgcgggttatacagttacagtacagccggaagaggagaattcttcagaggaagcagtaccggatgtggcagtatattcacttagtgaagacggcaatgtgatcgaggcttctgcagacacagagaacattgaggagactgtggcaggagtactgggagaggcagatcctgtatcaccgcttgcaagagaagcaagagccaataaaacggtggtgatctgtgccgggcatgatgcgacgcatacaggagccggcggtaatggactaagagaagaagagcttacttttaaagtggcacagtattgcaaacaggcattggagcagtatcagggagttacagtgtatatggacagagactctatttcctgtaaatatccgggacagagtacaagctactgtctgaatcagagaattaaagatgcagcagcactcggagcggccgtgtttgtagatattcatttcaatacaggagggggaacgggagcagaggtttactatccaaacaaaagctataatgaaggaatccatcaggaagggcagaatctggcaaataagattctgagtgagttgtcagcactgggattaacaaatcgtggtgcaaaaattaaagacggtaccacgggtgagacagattcgaatggaaataaagatgactattttacgacaaactatctttctaaacaatatggaatgacaggggtgatcgtagaacacgcattcttagacagtgcatctgatgccgcgaaattgaaagatgagaatttcctgaaaaaactgggagaagcggatgcagcaggaattgcagcaacttacgggttcagcaaaggcaataacggaaacgagcaggcaactgtgcagattaaaaataaaaatgattttaatggaactgcacagattgaggtgagtggttctggaaatggttacaaagtggcagtgtggagtgaagaaaacggtcaggacgaccttgtctggtattctttgccgggaactgcaagagttatcaattttgatattcagaatcataagaagtctaccggaaaatataatgttcatgtatataattggaatacgacatcgaatttatgccaggccgaattcagagtctcgggtaatactacttctacgttaaaggtttcttctgttgacaacagaagtgatttgtatcgggttcagctgaagtttgcagatatgccggatgacgtggatgtcgtacagtttccggtatggaacaaggcggatcaaagtgatattcgctggattacagctcagcagaaatcgaacggagtctgggaagcggatgtgagtattccggatcaacaggttggagctgtttatcaggtacatgcctatgcaaatctgacaagtggaacgctggtattccttgggaaaacaacgtttaaggtgattggaccaagtgcagatgtggagattcaaaattataatgcaaatcagggaacttttgatgttattgtgaaaaatgttgaagttccggcaggagtggaatctgtcagagttccggtgtggagtgagccggatcagggcgatctgatttggtattttgcagacaggcagagtgacggtacttacaaagttcatgtagatattgcaaatcatcacaacaacagaagtacctataatgttcatgtatatgtgatggataacaatggagtacagacattcgttgcgatgacatcccagcaggtgagtgaaacgaaggacgaactgacagcagaggataagagcggaaaagaaacgacatatcagctgaccttaaaaaatcacaaagcagcaaaagcaacaagcgttaattttgcagtgtggagtgaacgaaacgatcaggatgatctggtatggtatgaaggaaaaaaaacgtcttcaaatacatggagtgcagaggcttcgatcaagaatcataaaacagccggaaaatatctggttcatgtatatggaattgtaaatggaaagcagatctttttggatcagacaacatttgaagtttcagaagcgcaggcaaccctggaagtgggtacatatgatgtggaaaagaaaagttttgaagtaactgtcaaaggcatttcctgtaaatcaggtatcaaggaagtcctggttccggtatggagcaaagcaaaccagagcgatcttgtatggcatgagacgaaaaagcagagtgatggttcttataaagtgacgattaaagtgccttctgatatcaaaaatgcgaagtataatgttcatgcctatgtgaccgggaaaaacggagttcagtcttgtgtaggagtaacaacaaaggaagtaacgaatgagcaaattgttgtatcggcaaaagatacaagcaagaaagaaagtacttatcaggtaaaactggaaaaccagggaaaatatgacaggatcgatgatgtaaactttgcagtgtggagcgttgcaaatgatcaggatgatctgatatggtattctggcaacaaagaaagtgcgaatgtatggacagcagatgtcagcatatccagccataaaacggcagggacgtataatgttcatgtatatggagttgttaatggacagcagataaatttaggacaaactacgtttgaagtgtcaagcccaaaagggaaaacagaagtgagaaactataattctgttaaaggatcgtttgacgtgattgtcaaaaatatttcttcaaaatcaggggttcagtcagtacaggttccggtatggagtcagccggatcaaagtgatctgatctggtattcagcaaagaaacagagtgatggcacttacaaagtaacagtggagttaagtaaacatcaaaatcacaaaggaacctataatatccacacctatattaccacagagactggaatcatgacatttacggatggaattacatataatgtggtcagcgattcatccgaccaggatgaagaaaaattaactacaatcatgggggagacggctacaactgttgaacagatgatgcgctattatgaaagcagcggtaatcaatacccgtcagaggcgcttggaaaaggcggagcaccgacacttcgagatttctgtcagatgtattacgaagaagctgtggcggaaggtgtaaaagctgaggtggcttttgcacaggcaatgaaagaaagcgcatggcttaaatttggaggcattgtgaaaatcgagcagtttaattttgcgggacttggagcattggatggaaatgcgcagggacaggcagcgagtttttctgatgtccggacaggaatcagagctcagatccagcatttgaaagcatatggttctgcggaagacctgaagtcggcatgcgtagaccccagatttaaatatgtaacccgcaactcagcaaaatatgtagagtggctggggattaaggaaaatccggcaggtgtaggctgggcaagtgataaaaattacggatatgcgattgttgatatggtgaaagtgttgacaagcaaataaacaacgattcggaaactatgatttgagttgtttgagaaaaagaaccttttatgtgttaaagaagcataagaggttcttttttaatgaatttcagaatattctttcttttatgcctgatttacgataaaatacatagtatagattttaatcaatagttattttataaaaagctgggttaaaaataaacggatacgaggtaagagggtatggatagggaattggtaagtgttttaatggtgaattataatagggggacaacaattggagagagcatcaaaagtgtgctggcacagacatatacggatttagagttgattattgtagatgatggttcaacagatgattcctgttccgtgattgaaagtattaaagatccgagaatcaagttgtatcgtctggagcagaatgagcatatcagtcatgcgacaaattatggatttcaaaaggtgacaggagcatatcttgcaaggatagacagtgatgatgtctggtatccccaaaagctggaaaaacaaattacgtttttaaagaataaccccgaatataagatttgttttgcatggattgatttgattgacgagtatgggaatagcatcaatgagcagcaaaaggaattgctaggtgtgtttgaaactacatttcaggggcagagcgattgtttgcaccggttctttttcggaggaaactgtctgtcacatccttcagtggtgatgagaacggagttgatgcgggagacaggagattttaaccttgcatatatgcagtctcatgattttgattattgggtgcgaattgcaaagaaatacccaatttatgttatgcaggaaagactgttggcgatgcgtcgctttattcatgaaaacagtgaagtggaaaataacagtaaaacatatggtccgaatgtgatccgttacgaaaatgaagctgcaaatataaagcgtcatttttttgaggatatggaagatgaactgtttatcagaacattcaggcaggattttaaaaatccggagtcaagtacaaaagaagaattggaatgtgagaaaatatttttgctctgtaaaacatgtccggaattgcagaatatcctgcccacagggttagataattttttggagctgtatccgaagtatgcagaaatattaaaacagaaatttgattttacagttcatgatttctatgatttcacgggaaatcgagtttatcacaatgaaagagaagagaatgcaaaacgtagagaacaagaatgtttgaaagaagaacttcaaaaagtacacaaggaatgtgaaagactcaagatgcagattgaagcgtacgagaattcgaaaagctggaaagctacagctccgtttagaaaaataaaagctgtatggaaaaaatgagcgatacaattaaaaatgttgcatagatgttaaagaaatgttataattctaaagaatatattggaggttaaaattatgagaacatatttagtaaccggtggagccggatttattggatcaaactacattcattacatgtttaaaaagtatgacaacgaaatccgcatcatcaatgtagataagctgacatatgcaggaaatcttgagaacctgaaagatatagaagacagagagaattacacatttgtaaaggcggacatctgtgatgcagatgcgatcaacaagatttttgaagaaaacgagattgacagagttgtacattttgcagcggaaagtcatgtggatcgaagcattaagaatccggatgtatttgtaaagacaaatgtactcgggacacttgtgatgctcaatgcggcaaaagcagcatgggagcttcctgacggaacatttaaggagggaaagaaattccttcatgtttctacagatgaagtgtatggatcactggaagaagagggagaatatttttatgagacaactccatacgatccgcacagtccatattctgcaagtaaagcatcatctgatatgctggtaaaatcttatatggatacgtataaattcccggcaaatatcacaaactgcagcaataactatggaccgtatcagttccctgagaagttgattccgctgatcattaacaatgctctgcagggcaagagtcttccggtatacggagacggaaagaatgtcagagactggctgtatgtagaagaccatgcaaaaggaattgacatggttcaggaaaaaggaagactttttgagacgtataatattggcggtcacaatgaaaaacagaatattcagattattcatatcattctggatacgttacaggagatgttgccggaaggagatccaagaaaagaacttgtcagcgaaaagctgatcacttatgtagaagacagaaagggtcatgacagacgctatgctattgcaccagacaagatcaaagaagaagtgggctggtatccggagacgatgtttgaagacggtattcgcctgacgatcaaatggttctttgaaaatgaagaatggatgaaaaatgttacaagcggtgactatcagaagtattacgaggatatgtatcaagataaataagcagaactcggcagtatcgaaagatactgctggtttgcgttaaaatatataatattaggaggaaatacgatgaaaggtattattttagctggaggttcaggaacaaggttatacccattaacacaagtgacaagcaaacagctgttgccgatatatgataagccgatgatttattatccgctcagtattttaatggaagcaggaatccgggagatcctgattatttctacccctgtagatacgccaagatttgaggaattgcttggagacggaaagcagtttggaattcaactcagttataaggtgcagccgtcaccggatggactggctcaggcattcttgctgggagaagaatttattgacggagaaagctgtgcaatgatcttgggagataatattttccacggacatggtctgagtaagagattgaaagcggcagcggcaaaggaagagggagctacggtatttggatattatgtggatgatccggagcgttttggcgttgttgaatttgatcaggatggaaaagccgtttctctggaagaaaaaccagaacatccaaagtctaattatgcagttaccggtttgtatttctatgataaccacgtagtagaatatgcgaagcagatcaaaccaagtgcaagaggggaactcgagattacagatttgaatagaatttatctggaaaaaggaaatctggatgtggcgttattaggtcagggatttacatggcttgatacaggaacacatgaatcgttggtcgacgcaacaaattttgtaaagacagtggagacacatcagaacagaaagattgcgtgtttagaggaaattgcatacaacaacggatggattgataaagaagaattgcagaaagcatgtgaactctatcagaaaaatcagtatggtcgttatctgaaagatgtattggatggaaagtatatcgatcagaattagaagcaggaggaaaagactattatgggtaaaattaaagtagaaacatgtgagatagaaggtctgaaggtgatcactccaacagtttttggtgatgagagaggttattttatggagacctataattataatgattataaagaagcaggaattgatatggaatttgtgcaggataatcagtcatcttccaaaaaaggagtacttagagggcttcattttcagatcaattatccacaggataaattagtgcgtgtagtgagcggagaagtttttgatgttgcagtggatctgagaaaagattctaaaacatacggacaatggtatggcgtactgttatcagcagagaataaaaaacagttttttattccaaaggattttgcgcatggatttgtagtattgtctgattcagcagaatttgcatataaatgtacagatttttatcatccgaatgatgaaggcggtctcgcatggaatgatccggatattggaattgaatggctgattccggaagatatggaactgacaatttctgaaaaggatcagaaatggggcggaattaaagaattaaagaagtaaggggagcacaacatgatacagtatgttagaaatttccagaagtttcgtccgctgttaggcgaactcgttatgagagatgtgaagattaaatatagaaaatctgtactgggcgtactctggacattgctgaatccgctgcttatgatggctgtgctgtctatcgtattttctcatttgcttcggtttaatgtggaaaactatcctgtatacattttaagtggtcaggtaatgtacaattttttctcggaagctacatcaagtgcaatgacttcgattttaaacaatgcgccattgattaagaaggtgtatattcctaaatatctgtttacttttgcacggatcgcatccagtgtgattaatattatggcatctttcgcagcactgattttagtaatggtatttatgcgtatggagttacattacacgctgtttctggggattattcctcttttttgtgtgattgtgcttgcaaccggagttggacttatactggcgactgcgactgtaaaattcagagatatcatgcatttatacggagtcttccttacagcgctgacttatttatgtccggttatttatccaatgacatttttgtcagaaggatccctgatctatacgattgtaagtttgaatccgctgacaatcattatgaatatgttccgtgatcttgtgatttacggagttatgccgtcaatcggaagctttgtggccgcgataggaatatccggaatcgtgttggctatcgggttgtatgtattctataaaaaacaggatacctttatcttgaatctgtaaaaacataaaataaggagaagactatggaacagagaattgtggatgtggaaaatgtgtccataaagtttaacctttcatcggaaaaaatagacagcatgaaagattatttggtgaaacggctaaaaggtcagatatccttcgatgaattctgggcactgcaggacatcagtttttccatgaacagaggggattctgtagcattgattggattaaacggatgtggaaaaagtacgcttttaaagacaatcgcaggagtattaaaaccgacaaagggaagcgtaaaagtatatggaagtattgcaccgcttattgaattgggtgcagggtttgaccatgatctgacagctgaagaaaatatatatttaaacggggcaattcttggatacggaagacaggagatgcaaaagcattatgaggatattgtggagttttcagaattgcgggattttatgaatgtgccgattaagaatttttcttccggtatgttggcaagacttgcattttccattgcgacaattggaaacccggatcttttgattgtagatgaggtgctttctgtaggagatttccgttttcaggaaaagtgtgaaagacggatacagaatatgatgaaagaggatacctctattttgtttgtgtcacacagtattgaacaggtgcagaagctttgcaaaagggctatctggatagaaaaaggccatattgtaaaagcaggaacaacagaagaggtatgtccggaatacagagaggcatatcaagtataacagagaggcaaagttgatgaaaaaatggaaatatgtaatagtggcaatcgtaggtattttgtttgccgttatttattcgttcagaacctggccggcagaaatttatgataataacattgacagtacactttatacaaatgtgggagagctgacagaaggaagtaaagtcagccagcagtttacgtgtacacagaatggattaaacagcctggagttgacaatgagtaatctgggacaagaatgtgaagcggagtatgcgtggacattgacagagacggaaagtgaaaaagttgtggcaaaaggcgagtttacagctggtgaagtagataatagcaaaaatatggttttaaaactttctgaattggaagaaagtaaaggaaaacagtatgttctcacaattgagacagaaagtataaaatcagagcacggggttactgttatgacaacggaccgcagtctgaacgaagacggaaagctgtcgataaacgggaaagagtcatcgcaggtgcttgtgatgaaggaacaaatgaaatatttcaatacggagacatttattgtattgttaggattgattgcttatcttgtgtttttgatcacatttttaaacagactttttaagtaatcatcagtttggaggaacagcatgaatttcaaatcctatattgacgcaataaaatataagaaaatgggtaatgaatcctgctttatcattggcggctggtgtttttcggtttcgggagaaaaagttgagtatcaggttttgataaatgggaaagcagtgaaatttgatatacaaaggattgcgagaagagatgtcacacaaaaaatggcgaaatatcagccggaattgtcgtgtggattctctatgaccattccggtgaatccagaagtagaagctccaaaagcattggagctttatgctgtaagcggaaatgagaaaaagaagattgtgtcattgaatgaagcaaagatagagaagattacagatacaagaagtatttcttatcatttagagtatgtaagaccagaagaaaaaggagatgctgtgaaatacagcatcggaggatgggcgatttctgaaaaaaaggcgcgggacatggagtatcaaatattagatgcgtcaggtcaggatgttgataagacagtccgtatggttaacagagatgatttgtacaaacttggaatggtagataaagaaaagaaatattgcggatttattgtggaatttcttggagatcaggataaaacttacacatttgtgatcagcgatggatataattctgtaagaaaaaaaattgtctacaaagaagttgtaaaagcaaacagaagattatctcaggttggtactgtaaagatgatactgcataatcttaatggagagaacattgtaaaaggatgtgcatatctgaagaagaatggagctaaaaagttgatcagccgtctgaaaaaaggcgttcacgtcaatggaatcccttatagtgagtggtatgaagctcataaagtgacagaagaggaactgaaaaaacagagaaaaaaagtgtttgaatatcagccgaaattcagcattatcgtgccgacttataacactccgattccgtttttgcgtgagatgatcgattctgtagttgcacagacatatccgaattgggaattatgtattggagacggcagtgaaggcaatccggaattagagcaggtacttgcagaatatgctgcaaaagatacaagaattaaatatcagatactggaaaagaattttggaatcgcagggaatacaaatggtgctttagagctggcaacaggagaatatgttggattatttgatcatgatgatatacttggtccaaacgctctttttgaagtaacaaaagcgcttcagaagaaaaagtatgatattctttacacggatgaagataaggtgtcaggtgatctgtccgaacatatggatccgaattttaagccggattggagcccggatctgttttattcgcacaactatattacacacttttttgttgtgaagaaagaaattatagataaaataggtgggtttagaagcgaatatgatggttcccaggattatgacctgatgttccgctgtattgaaaatgcggaaagcatcaagcatattccgatgattttataccactggagaatgcatggcggatcagttgctgaaaatccggcaagtaagatgtatgcatatgaagcagggaaaaaggcgatagaagatcatttcgagagaaccggtgtaaaggtaaaagttgaacatatgccgttatggggaatgtaccatgtgatttatgaaacaacgggaaatccactggtttctgttattatcccaaataaagatcatacgcaggatctggatacgtgtattcgctcattgtttgaaaagagcagttatcgtaatattgaaattattattgtagagaataacagtgaagaggcaaaaacattttcatattatgaagaaatacagaagaagtatgagaatgtaaaagttgtaaaatgggaaaatgaatttaattatgcagcaatcaataattttggcgttacatttgccaagggtgattactatctgttcctgaacaatgatactgaagtaatcaatgagactgcagtcagtgaacttcttggctgctgtatgagagaagatgtgggaatcgtaggagcaaagctcttatatgaagatgataccgtgcagcatgcaggaatcgtgcttggattcgggggctttgcagggcatgtgtttaccggacttgataaagatgattacggctacatggtaagaccgagaatcaactgtaattatagtgcggtaacagcggcatgtatgatggtagacagaaaagcatttgaagaagtaggcggattcagagaagaattcaaggtaggattaaatgatgttgatttctgtttgaaggttcgggaaaccggaaaactggtagtttacaatgcgcactctttatggcatcattatgagtcaaaatccagaggatatgaggatacacctgaaaaaatccgaagatttgaaggtgagattgctctgttccagaaatattggggagaccttttgaagaaaggagatccatattacaataaaaacttcccgattgaatacggtccgttccgtttgggatgattttgagaaatatgcaaatagttgcaagctgagactgcgaaggaggacaatttatgaaagcattagtaacaggagtaaaaggtcagcttggccatgatgttatgaatgaactcgcaaagcggggatatgaaggtgttggtgtagatgttgaagagatggacatcacagatgcagcagcagtagattctgtcattcgtgaggcaaaggtagacagcgttgttcactgcgcagcatggacggcagtggatgcagcggaagacaatgaagaaatgtgcagaaaagtcaatgctgaaggtactgagaatattgcaaaagtatgtaaggcacttgatatcccgatgatctatatcagtacagattacgtgtttgagggagaaggaacacgtccgtgggagccggatgataaagtaacacagccgctgaatatttacggacagaccaaatatgagggagaacaggctgtggaacgtctcctggacaaatattatattgtccgcatcgcttgggtttttggtgtgaatggaaagaattttatcaagaccatgctgaatctgggagagacacatgatactctgacagttgtggacgatcaggtaggaactccgacgtatacttatgatcttgccagactgcttgtggatatgctggaaaaagatgcttatggaaaatatcatgtgacaaatgaagggggatatatcacctggtatgaatttgcaaaagagatttttgcgcaggcaggaatggatgtcaatgtagttccggtgacaagcgacaaatttccggcaaaggcaaaacgccctcacaacagcagaatggacaaatctaaacttaagaaaaacggcttcacgccgcttccgacctggcaggatgcattgaaaagatatttgtcagaaatccgttaaggggggaatgggagtatgaagaaaaaatatgtattgggaattttgacagcggttgtgctgatgtttggaattacagcctgtgaaaaaacagaagagccggctccagagcagagtgcaacacaggaagaacagaaagaggatcaggacaatgatacatctgatcaggatgtcaatcaggacggacagaatgaacaagaccagacacagcaggagcagacagaaaacacgcaggatgtaaataatctgggagcaggaacaattactgtgtatgcccagaacaaggatgtgtccggctttgataaaaaagaggtttcgcttgaggcaatcacaccggaaactgttctttctcagttggcagcagccggagttcttccatcggataccacagttctaagttttacaaagaaagaaaaggatggagaacaagtcattgatctggatctttccgaaaagtttggaacttacatgaaagagatggggtcttctgcagaatatttggtgatcggaagcatctgcaatacgtatttggacgtttaccactgtgcaaaaattcacattaccgtaaacggagagatgcttgccacagggcacgcggagtatccgggctatatgacaagattttcttaaaaaagagtaaaaagcaccctgtaaggggatccggcagtatgtgcaggcttcccttacagggtgttttctatttatgcaataattttcttttcagccagtcggccgcataaccgaatgtgtggcgtatcagggcaaattcgatccggatatagctgcctagatgctccatccgaaacggaaccttgcggcatttggacagaccatggattccttctttgattccgtttttgtaatctgttccaaatccgattttgcagaaaaataaatatttcaccagatatcccaaaagtaatgggatgaaattcaggatcagctgcaaaagcggcatatttttgtaattcagccagacactgttgcgggcggatagtttcactttaaaagtgttatatttggaaccgctcgttccgcttccgacgtggtacacaagagcggaagcgcagaaccggtttttatagccgtagatcatggcacggtaaccaacatcgatatcttccagataggcaaaatggctttcgtcaaagaagccgattttatcaaacacgcttcgtctgtagatagcagctccggcacaggccgtaaataccgtatcatcttcggtgtaattcgaaaccggtcgtccggctccccggcatacaccccagcccatcaaggtatagagatctcctgcgctgtcgatcagatcggggtgatacatctggatcatcttgctgctcacagaaaaaatccggtcagagacctcgatcgcccggagcatctcttcgacataacgagaatccacggttgtatcattgtttaaaagaatgacgtacggggtatctgcgtgacgtatcccttcattgaccgcacggctgaatccataattagaatccagggccagcacttcgatatcagggtaagtctgttccatatattccagacttccgtccgtggaggcattgtccacgatcaggatcttgaaatcccggcaagtctgttcatttaaagaagccagacagggctccataaaatgttttccgttataattgggaataatgatagtaactttcatgtgctcctcatttctattactgctgtaatttatttcgcgaatgtattatatcaaattcggttctgtttttctatacaaacatatgtttattaaaaattacgaaaatattacggaaaaatgaataaaatactgttaaaatcaagtttgtgcttgtccattgaaataaagtattgtattatatcatagataatgtgtttttataagtaagttagcggaaggtcgtattatgataaaagaaaatcagaaattattaaaccgtattcaggttgtgctggatgcaggagtgatcattgtagcatatgtgctgtcctggtatatccgttttcggagcggattatttgacctggatccatggtatctgtcactgagagagtatatgaaggtactgttctttctggtgccgtcctatttaatcctgtattacgcatttcagctctacacgccgaagcgggtacagggaagaaggctggaagcctggcatgtagtacaggcgaatgtgatcggcctgatgggtgtgaccatggtatttttccttgcaaagctttcagacagatattccagatgggtagtatttatcttctgctttgtcaatattaccatggaagtattcgccagaaatatggtgaggatggttttgcgcaaggcgagaaagaacggatataatcagaaacatatgattctggttggctacagccgcgcggcagagcagtatattgaccggattcttgcaaacccggagtggggatatgctgtgcggggaattctggatgaccaccagccgagaggaatggagtataaagggatcaaggtgatcgggagtatcgacaatctgctggtcattcttccgcagaatcagatcgatgagattgcgatcacactgggactggatgagtatcacaagctggaatatattgtaaatatgtgtgaaaaatcaggtgtgcatacaaagtttattccggattataacaatatcattccgacaaaaccatatacagaagatattcagggacttcctgtgatcaacatccgtcatgtaccacttaataatgctttaaataagtttgtgaagcgcgcagtggacatttttggtgcaatcgttgcgatcattcttttttcacctgtgatgctggttgtatctgtgctgatcaagctgactgcaccgggaccgctgatttttaaacaggagcggatcgggctgcagaacaagccgttctacatgtataagttccgttccatgatcgtacagaaagagagcgaagagaagaagggctggacgacaaaagatgatccgagagtgactccggtaggaaaatttatccggaagaccagcattgatgagcttccacagctattcaatgtgctcaaaggagatatgagcctggttggtccgagaccggagagaccattgtttgtagaaaagtttagggaagagattccaagatatatgatcaagcatcaggtgcgtccgggactgaccggatgggcacaggtgaatggctatcgtggagatacttcgatccggaagcggattgagtgtgacctgtattatattgaaaactggacgttgggactggattttaagattatcctgctgacgttcctgaaaggctttatcaacaaaaacgcatactaaaacggaggcggatctatgtttcgcagaagagagcgaatatcgctgcagcagagaaaacgattgaataaaaaaagacaaaggcggggaatcctgtttttggtcctggaatttctgatacttgcggttcttgttttggcggcatttatgatgtacaagctggatcatctcaaccataatacactggatgagagcagcctggaactacatgagacaccgaaggaatacacgaatgtggcattgttcgggttggattccagagacggagagctaagtggcggcgtgagaagtgacagtattatgattgtcagcatcaacaataagaccggagatgtaaagatcatttccgtatatcgggatacgctgataaagcagcaggatggttcttatgagaaagcaaatgcggcgtattcctttggaggtccgcaggaggcagtggcaatgctcaaccggaacctggatctggatattacaaaatatgcttctgtaaatttcaattcgcttgcagatatcatagatatcctgggtggggtggaagtagagctgaccagtgaggaaatattctggctgaatggatatacggcagaaacctcacaggtggtaggacggcagacacataccctggatgagaattctccgggagttcacaatctggatggaatacaggcagtttcatataccaggatccgttatacagccggagatgactttaagcgtgcagagcgccagagaatcatattgcagaagatgattcagaagctgaagacagcaggaccggtaaaatggaataagattctggatcaggtactgccggaaatatcaacgaatatgacgacaccggatatcatgaaactgggactgaatatattccgatacaaaattggagagacaaaaggctttccgtttgatattacgaccagtgaaaatgtcattggactggaaggctcttatgcggttgcgatcggacatgcggacaatgtaagacagctccatgagcagctttttggagagactggataccagccttcggacgaagtacagcagatcagtcaggatgtggcttatctgacgggggtttatccggaaaattatgcacagtagcgaaagaggaaaagaatgttacgaaaaatgatcgcagacagaaaaatcgaatatagttcttatactttagtttatgcggcagcggtattggctgcaaaggcacatctggattatgtgactgcagtacttctgatggcagaggcaatgtttttgtttatatggaattttagaaagacaaaaaatcttgtggatatgcgggggctttttacgctggcatgggtaggcggagaaggcatcgcatgcctgaagctcagcaggctgcagagtgactggagcaatgtgacatggctgaccttttttctgatctatgtgtgtttcaatctgggatatgatctctggcttggccgtttttcgaaagaacagaggcaggaagtaaaaagagatgagatctcggcaaagcggattctgatctgcatcttcggactgatggcagcttccattgcatgttttacgttggaggcagtggtggtaggttatattccattgttcaattcagcgcctcatgcatattcttattttcatatttcgggagtgcactattttacaatcagctgcattttgattccggcactgactgtattgtataccaaggttacagaaaaaatttcggtcaggacatggatacttttaattgcaggaaacctgacggcagtggcgattcctattttatgtgtctccagatttcagctgttgtttgcggttggctttgcggcagtgatgtatctgatgttgtataaaaaaatcacatggaagatgatcgtcacaggtttattgatcatgattccagtgtatgtacttctgacagttgcaagacggcataatgtgacttatttaaatggaatttttgagatgaaaaattccaaaatgccgatttttattacacagccttatatttatgtagccaataattttgagaattttaactgtatggtagagcagttgacagcgcacacatggggactgcagatgctgtttccgttttttgcactgacgggattgaaatttgtatttccacagctggtgacaattccggattttgtcacaaaaacagagcttacgacgttaacgatgttttatgatgcctactatgattttggaatcatcggaaccgctttgtttgcgtttataatcggtctgactgcagcagcagtttcaattccggtgcgtcagaagaaaaatccgatgacgtatatgttttatggacagattgcgatttatctggggcttgccttttttacgacctggttcagtaatccgacgacctggttctggctggcactgactttgatgatgtactggtttgtcggatatcgcaggaaaggaaaaggttcacatggaaggaaatagaacagtggatgtgctgatccctacgtataagccggatcagagatgcgtacagctggtaaaacgtctgttaagccagagtgttcaggtcaatcggatctatctgatcgatacagagagcgggatctttccaaaagagttgtatacgatttctgacagagtcaagatccaccggattctgccggaagagtttgatcacggtggtacgagaaatctgggagctgagatgtcagatgcggagattcttgtctacatgacccaggatgctatgccggcggatcaatttctgatcgagcgtctgctttacggattttcgtatgaaaacgtagcagcagtttatgcaagacagctgccggcagcggattgtcagtttattgagcgctatacaagagaatttaattatccgaaaaccagcagattgaaatccaaagaagatctttccaaactgggaatcaaaacctatttctgctctaatgtctgtgcagcataccaaaaggatgtatacgaaaggcttggaggatttgtacgaaaaacgattttcaatgaagacatgatcctggcaggcaggatgattcaggcgggatggaagatttattatgcggcagatgcaaaagtgatccattctcacaattataactgcagacagcagtttcaccggaattttgacctggcggtctcacaggcagatcatccggagatttttgaaggagtaccttctgaaggagaagggatacgtctggtgaaggatacagcaaaatatctgttgaagtcgggcagaccatggcttctggtatctcttgtatgcaagagcgggtggaagtacataggatataaactggggaaaaattataagaaactgccccggtggctgattttgaaatgtacgatgaatccacgatactggagagaaacttgaaattcacagttttttcattgatgtttgaaggaaaatattgtatgatgttaaagtgcatattttaggcaatctatgatgtatgccatgagaaaggatagaattatgggagatacaagaaggcgttcgagagcagtaatgtccggagcggacagaagaagttctcagaggtcggggcagccgcgccgccgtccggagcaaagaaatcagatgggagacgacagggacaaaacgcagagacagcggtccgcccagagaaaacgaccgtccggcagcacttctgccaatggaaggcggtctgcgaacggaagaccttcacagaaggggcgttcgagaaagcgggcaaagagaggatttgcatcctggtctacagggaaaaaagcagtggcgattctgatgggggttctgatcctgctgattacagcaaccgttgcagtggttgcggcaaaatggggaaaaattggcggtgttgcattaaatccggataagcttgcgatttcggaggaagcagagatcagcggtaccggttacctgactgttgcactgtttggtctggatacgcgtgagacagatgaggagatgggatcccgaagtgatacgattatggtggcgtctctgaaccgtgagacaaaggaaatcaagctggtttctgtgtacagagatacgcttctgcagctttcagatggaacttacaataaagcgaatgcagcatatgcttacggcggtgaagaagaagcggttgctatgctcaataagaatctggatctgaatattgagcactatgtgtcagtggatttttccgttttagttcatgtgatagatgcccttggcggaattgatattaatgtagaagaagcggaaaatggcatggacatcattccgtatctgaacaactatgttgtagaagtgattaaaaatacaggagtggattcagctccgtttacgcagttaggacagcagcatttgaatggagtacaggcaacggcttatgcccgtctcagatacggcggcggtgacgattataagcgaacagagagacagcggcaagtactggagcagattgcgataaaagcgcagaaagcaaaactttccacgatcaacaagatcattgataaggtgtttgacaacgtgaagacgaattttacactgacggagacgattgcttatgcaaaagacgtgaagtcttataaatttggagagacgcagggatttccgtatgaaagtacaacggctgatcttgatgttggaaattctgttgtagcgacagatctggcatccgatgtgacgaagctgcaccagttcttatttggagagaacgattatacaccgtcttctacggtacaaagtatcagtgaggatatttccaactccacgtatgatacgggagaatcttacgatacagaatatgatgagtatggatattctcaggattattccggatatgacagcggctacacagataacagttatggaactggcggatatcaggacagtggctatggagatggcagctctggtaatgggtatacagaagataccggcggtgattatgtacctccgtcagatggcggcggtacagatagtggaagcagcgacagtaattcccagataccggataccggaaccggcgacagtggtgataccggtggagagagcttagaataagggaaaaacagtttttatttatacgaagaaaagtcgagagacaggaaagaggagatgtacatgaagtcgttgaaaaagatagggattcttttgtttgcagtgtgctttctgatgctgtatccttcagtgtctgtacatgcggcagaaggaacgcttcagttttcggatcctacagcaaaagtaggagaggatgttacagtcaaagctaagatcagtactggtggagaagcaatcggggatggttttgtcacagtaacatatgacaaagcagcactggagtttgtcagcggaaccaatgcaaccggtggggacggaacggtgaagctggaggctaccggggatggaactgtttcagagctggagtataccatggtctttaaagcgctgaaagaaggagcaacaaagctggaggtgtcagattatacctcttatctgtattctgatgaaactttaaatctgacaacaggtgattccacagttaccgtggaggcaggggacggaacatcgtcagagagctcagcagggaccactgcggtggccacaggaacgggaagtgtagagatcgacggagtcacatacacaatttacaatgatttttccgacgcgcttgttccggacggatgcagcagaactacgatggagtataacggagaaactgtaaacgcgattttgcaggaaacttccggaaagtattttgtgtatctggttgagggagacaaagacccagtgatggcactttacaatgaaaaagataactcatttgcgattacagagatggtgtccattacagattccagttatatctttttgttgggaacaaatgatggaaaaggactgccgtctcagtttaagaaaacaaaactgacagtcggcacactgactttcccggtatggcagaattcagagagtgaggacttttatctgatgtatgcgatgaacgaatcaggagaggaatcgttctaccagtatgatacaaaggatgaaacgtaccagagatatccagtcacagatgtaaaagaaaagagtacaagttcttcgacaacactgatagataaagtaaaaaactttcttcaggatcaggtgctgattgttgtagcagcagcctgggcggttattttaattttgatcatcattattattgtagtcggcgtgaaattacgcagaagaaatgaagaacttgatgaattctacgatgagcatgaatccatcgggaattcaaaaggaagtcgtgcagttgttgagaaaaaatctcgtaaacagttcaaaggatatcaggacgaagaggatgattttgtagatgacttcgaagacgaagaggaaacagatgacgaagatcctgatgaatacgaagagtacgaagatgatgacgaatatggggaagatgattacgacacatacgaggacgattcggatgaatatgaggatgattttgaagagtacgacgatgacgagtatgaagatgatgattatgacgacgaatacgatgagtatgaggactatgatgaagaagaggatgatgttccagagtatcagccaaaacgaagatcgtctgctcgtgaagaaaaagacagctatgatgtagattttatagatttataagaaattggggcaaacaacagggagagtctgtggtatgccccgattttatttataaatagtcactttaaggagagtataaggaggagaaagatatgtgtggaattgtaggatatgtaggagaaaagcaggcagcgccgattttgctggatggattatcaaagctggaatacagaggatatgactcagccggaattgcagtctatgacggagcagagattcagacagaaaaatcaaaaggtcgtttaaaggtgctcagtgaactgacacatgacggacagacaatgccgggaacaatcgggatcggtcataccagatgggcaacacatggtgaaccgtcagatgtaaatgcacatccacattataacaaaaataaaaatattgttgttgtgcacaatggaattattgaaaactatttgaaactcaaacagaagctggagaaaaaagggtatgagtttgtgtcggagacagataccgaagtactggcacatcttctggattactattatcagggaaaccctctgcaggcgattacaaaggtaatgcatcgagtagaagggtcctatgcacttgggatcatgttccaggatcatccggatgaactttatgcagtgcgaaaagacagtccgttgatcgtgggagagacagaaaacggatgtgtgatcgcatccgatgttccggcagtgctgaaatatacaagagatgtatattttattgaaaatgaagagattgtacgtatggaaaaagattcgatgcagtttttcaatgtagatgaagaagaaatcaagaaaactcctgagcatattgagtgggatgccaatgcagcagaaaaaggcggatatgagcattttatgctgaaagagatgtatgagcagccaaaagcaattctggatacgttttcaccgcgcatcaaaggaaatgatatcgtgatcgaagagcttgggatgtctgatgaggaaatcaaggcaatccgcaaaatcatgatcgtggcctgtggatctgcatatcatgcgggagttactgcaaaatatgtgatggaaggaatggctcggattccggtggaaacagatctggcttctgagttcagataccgtgatccgatcatgggggacggaacattggttgtgatcatcagccagtcaggagagactgcagattctctggcggcactgcgtgaagcaaagcagagaggggcaaaggtacttggaattgtcaatgttgtcggaagttctatcgcaagagaggcagataatgtcatgtatacatgggcgggaccggagattgcggttgcgacaacaaaagcatactccagtcagttgatcgcattgtatctgctggccatgaaatttgcatttgtgagagggaaaatcacagattcggaaatgcggggatatattgaagatcttcagaaacttccggagcaggtggagctgttattaaataacaagaatcgcatccagaagtttgccaaccgttatctggcagcgagagaagtattctttatcggaagaggaatcgattatgcgatttccatggaaggatctctgaaattaaaagagatttcttatatccattcagaggcatatgctgcgggagaattgaaacacggaaccatttctctgatcgaagagggaacactggtaacagcgattcttacacagaaagagctgtacaaaaagagcatcagcaatatcgtggaagtaaggaccagaggagcatttgttcttgccattacaaatgaaggaaatcatgagattgaaaaagcggcagattacgttgtatacattccgcagaccaatcgatattttgcaaattctctggcgatcattccgcttcagctgttcggatattacatttccgtcggaagaggatgcgatgtggataaaccgagaaacctggcaaaatctgtaacagtagaataaataaagctggtttcaagaattgttaaaggattgaacacagtttcatcacaaaaggacggtatgatagcagtataaaatacaagagaaagaaggaattgatatggagaatcaatacaattattaccattctgaggaaccgcagaatgattcatcttatagcagtcagccgaacccggagcatcatgaaaaaccaaaaaagaagatgccaaaggccgttgtggtgacaggatgcgcgttgctgttcggagtggtttcaagtgccacatttttaacaacaaatgtagtcggaaacaaagtgctgggactggatcagaaggctgcaaaagaagtatctaatacaacacagaataaagcgacactgacgaagacgtccagtgtagttacatcggatgtttccagtgttgtggaatctgtgatgccatccattgtatccatcacaaatatgagtgttcagcaggtgcagagcttctttggaggaacctcccagcaggaagtgaccagtgcaggaacaggaattatcattgaaaagacagattcagagcttttgatcgttacaaataatcatgtcgttgcagacagcaatcagctgacagtgacatttgacgatcagagcagtgtggaagcagatatcaaaggaacagattccgcacatgatctggctgtgatcgcagttcagctggataagatttcggatgatacactggacaaaatttcagtagcgacacttggagattctacaaaattgaaagtaggagaacctgccattgcaatcggaaacgcactgggatacggacagtccgttacaacaggagtgatcagtgcaacagacagagagagccagacaacagacagtgcaacaggagagacaacaggatcttctgatgtaaaactgattcagacagatgcagcgatcaatcctggaaacagtggaggagctcttgtgaatgcaaatggagaagtcattggaatcaactctgcaaaactgatcggagagaatgtagaaggaatcggttatgcaattccaatctcagatgtcacagacattattacaaacctgatgaatcaggagacaaagacaaaagtatctgaggcagagagaggatatctcggaattacaggactggatgtagaagattctgattctcagcgttatggaatgccgacaggtgtttatatttccgaagtatcacgcggaggcggagcagctgatgcaggaattacaaaaggaagtatcattgtaggattcaacggaatcacaattgacagtatggagtcattgcaggagcagctccagtactataagaaaggcgaaaaggtaacactgacgcttcaggttcccggagatggtggagaatatcaggaacagacagttgatgtgacattgggaagcaaagctcagtaaaaaagataacatgtaaaaagcggaagcaaatagtcaggcttccgctttttttgtggctgtaataaagccacggaaaagtcgccgcatcttttcgctgcttcgaaacatacattccggatgccactgaactccaatggcaaaaggatgagaagaatgctcgatggcttctatcgtctgatccggggcaagagcgctgactttcagatcaactcccggcctgtcgatcgcctgatggtggaagctgttgacgtaaacagatcggccaagacaggaaaagagtctggaagacctttcaatccggacaggatggctgacatcactgcgggagtcagatcgctgcatatgatcaagagattctccaggctggtagcggatatcctgaaacatggttccctgacaggcagtattgaaaatctgcattccgcgacagatggaaaatacaggttttgcagaagacagaatcagcttcatcaggcggatctgaaacagatccagtgtgatattggtgtttccgatgccttctctgggttcctgaccaaataacaaaggcgtgatgtcatttccgccgcagaagagaaaaccatcgcacagccgtagatattgttcaagcatggtatctgagcggatcagcggaagcaggatggggataccgccggaataccggacagactgaatataaggattggatacaaactggcggttgtccgacaatccgcagacaacaatgccgatcaaaggttttgcagattcagatttcatttttgcgtctcctgtcatataatagtgatggttttagcatatgtaaaaaaagaagcgcttatacgtaaatccgaaacaaaaaaggagaagaaaatgagaaaatggatcgatatgcactgtgatacattgagtgagctgctgtcggcagaaacgctggaggagaacagtctttgtgtggatcgaaagagaatggaacagaccaaaatgctggcggaattttttgcatgttttgtatgtgtaccagatggaaagtgggaagaagcataccagaaggtgatcgagatgattgcccgtatggagcgtgagacaaaagaaaataagaaattaaagcttataaaaacagcaaaagagttagaatatgcagaacgggaggaactcaatctggcactgctgaccgtggaagaaggcggcgttttaaatggaaacagaaaccgccttgaagaactgtatcagagaggtgtccgcctaatcacactgacatggaattatgaaaattgcatcggatatccgaacagcagaaatgcacaggagatgcaaaagggattgaaatcttttggaaaacagatggtagaagaaatgaacgaaagaggaatgctggtggatgtttctcacttgtcagacggtggcttttgggattgtatccggctgagcaaaaaaccgattatagcgtctcattctaatgcccgcgcactttgtgcgcacccgcgaaatctttcggatgagatgctttgtgcactcggggaatgcggaggtgttgtgggacttaatttttatccgcagtttttacaaagcgatcggtcagcggaggttttggatattgcaaagcatgggatgcatatcctgcaaaaagccggagaggattctgtggcactgggaacagatttcgatggatttgaggcagggcagaactggcttcgcgggattgaagagatcgagtgtgtatgggatgctttgaaaaaggcaggaatgacggaacgtcagctggataagctttcgtatcagaatgtcaaaagagtgcttgaggaagtgctttaaatatttctcaaaacaaagtctggttatcggcaggagaatctggtacaataggaaagattgaaactacaaaggaaaaggatagggaggatttttcaatggaaaatcagaaaatcattcaggtggaagaaaaagtgccctttaagatgctgcttccactgagtattcagcacatgtttgccatgttcggggcatccgtgcttgttccgtttgtgttcgggatcaacccggcagttgtactgtttatgaacggaatcggaacactgctatttatcttgatcacaaagggaaaagctccggcatatttaggttccagttttgcatttcttgctccggcaggagttgtgatcagcaaatggggatacgagtatgcgctgggtggattcgttgcagtcggatttctgggctgcattctggcgctgatcatctataagttcgggtctgactggatccatgtagtactgccgccggcagccatgggaccggttgttgcactgatcggtctggaactggcaggaactgcggcatccaatgcaggattaaaagacgaggtgatcgatccgaagaatgtgatcgtatttcttgtaactttaggagttgcagtgcttggatcagtggtattccgtaagttttttgcggtgattccgattctgattgcgatcattgccggatatgtggccgctgttatctgtggaattgtcgatttctcaagtgtgagtacggcgtcctggctggcaattccgaatttttctgcaccgaaattcaagtgggaggcaatcgtcattgtgctgccggttcttcttgtgatcgcttccgagcatatcggacatcagatcgtgacgagtaagatcatcggcagagacttgctgaaggaacctggacttcaccgttctctttttgcagataacttttccactatgatctccggatttatcggttctgtaccgacaacgacttacggggaaaatatcggagtgatggcaatgacaaaggtatacagtgtatatgtgatcggaggagcagctgttctttctattatttgttcctttattggaaaactgacaatgctgattaattccattcctggaccggttatcggtggaatttcgttcctgctttacggaatgatcggaacttccggtatccgtattctggtagaagagcaggtggattacggccgttccagaaatatggcaatgacatccgtgatctttgtgacaggattgtccggaatttccgtagaatttggcgggatccagctttccggaatggtacttgcctgtgtgacaggaatgctgatgggacttctgttctttgtactggatcaattaaaactgacaaatgacagagaggcagaataaacagctgcttccaaataaaaagatggcgaaagttcgtgtatgagctttcgccatctttttattttatcttatttttctaattcctgcattttcattgcacgcactttcagaggaagtccgaacaggttgataaatccttctgcatcgtggtggtcataaagctctccggttgtgaagcttgcaagggattcactgtataatgagtaaggggaagttgttcccgctttgatgatgtttcctttgtaaagcttgaattttacttctccggtcacatactgctgtgtgacatccacaaatgcctggactgcttcgcgaagcggtgtgaaccattttccttcgtatacgatctgtgccattttatttcccatgtccttttttacttcataggttgcacggtcgagtacaagttcttccagctggtcatgtgcttccatcaggatcgttccgccaggagtttcataaacaccgcgggatttcattccaacaacacggttttctacaatgtcaacgattccgattccgtgttttccgccaagtttgttgagttctgtgatgatctcagatactttcatttcttttccgttcaagcttttcggaacacctgcttcaaatgtcatggtgacatattctccttcgtctggtgctttttcaggagaaacaccaaggacaagaaggtcatcgtagtttggctcacatgcaggatcttccagctccagcccttcatggctgatatgccacagattacggtcacggctgtagctgtgttttgcatcaaatggaagatcaataccgtgagctttgcagtattcgatctcatcttcacgggactgcatggtccatacatctgtcatacgccatggagcaatgatctttaagtccggtgcaagcgctttgattccgagttcaaaacggatctggtcatttccttttcctgttgcaccgtggcagattgcagtagcgccttctttgcgggcaatctctaccagttttttcgcgatcggcggacgagccatggaagttccaagcagatatttgttctcatagactgctcctgccttcacacatggaacaatgtagtcgtcgcagaattcgtcgatgatgttttcaatgtagagtttggaagcgccggataattttgcgcgttcctctaatccgtccagttcttcgccctgaccacagtcgatacagcagcagatgacttcgtaatcaaaattatctttcagccatggtatgatggcagtcgtgtcaagtcctccggaatacgccaatacaactttttctttactcataatgatatcctccttaaaaaatctctattgtctgatatgttgttgccaatcgtgtatgacaaaaccgttacgctttagaagctaatcagtaatatacacctaaattcataaatatgcaatagaaaaatggaaaaaagtgaaaaatatacaataaaattcaaaaagtatgcataaaataaaaaggggaatacagagcggatgcaaatatgttgttggaaagcgatccaatatcagttataataagggtattgtaaactgtggattaggagagaatgtgtatgaatatattagttgtagtagatatgcagaatgattttattgatggttctctgggcacagaagaggcgcaaaggattgttcctgaagtagtgaaaaagatacagacatttgatggaactgtgtttgcgacaagagatacccacgaagagaactatctggagacggcagaaggaaaaaaacttccggtcagacattgtatccgtggaacagaaggctggcagatcagacaggagatctcagatcttctgacagaggcgcctgttgataaagtgacgttcggaagcagggagcttgtgaaaaagctggagcagatccaggaagagacttcgatcgagagcattacgctgatcgggctttgtacagatatctgcgtgatctccaatgccatgctctgtaaggcgtttctgccagaggttcccgtacaggtggatgcgtcctgctgtgcaggagtgacggtggagagtcacatgcaggcgctggaggcaatgaagatgtgtcagatcgacattttatagaagatacaggaatgaaaaaagagggtacaaaaagatggacagaaaagacatactgctgaataagcagaggattgtgatcaaagtgggaacttccacgatcacttatgaagaaacaggaaatatcaatctggagaagctggagaagtttgttcgtattttgatcaatctcaggaataaaggaaaagaagtgatcgttgtctcatccggtgcagtcggagttgggaaaaatgccctgggaatggacaggcgtcctcagacggagtctgaaaaacaggcatgtgcggcagtcggtcaggggaagctgatgatgatctatgaaaagctgtttaacgaatacggacagctcacggcacaggttctgctcacaaaagaatctgtgacaaatgccaaatgccgcaaaaatgcaaaacagacatttgatgagttgtttaagatgcaggttgtcccgatcgtcaatgagaatgacgccatttcggtggacgagctttcttatgggaacttcggagacaacgatacactggcggcatatgtgtcccggcttgtggatgcggatcttctgatcctgatgtcagatatcgatgggctgtacacagatgacccgcgaaaaaatccgaatgcaagatttatccatacggtcggcaagatcgggcggggtctggaaaacatggcaaaaggagcatccagtgattgcgggacagggggtatggcaactaagatcaaggctgcaaaaattgccactgcagcaggggcagatatgatcattgcaaacggggataatatttattcgatcaatgatgtgatgaatggtaaaaaagtaggaacgttgtttttgtcagagcagcatcagaaagagatggcagaagaggtggcgcctgaacgggcagagttccgcagacaggcaaaacgggaaaagaaggtttagatggtatcaggaaaggagactgtatggaaacgtatatggagacattgggatgcagagcaaaagaagcatcaagggcagcggcaaagctgacgaccgttgaaaagaacagagggcttgaatttgtggcagaagaattatgtctgcgaaaagaagagttgctgtcagaaaacgagaaggacatggaggctgcaagagaacaggggatgtccgaagcacttcaggacagattgagactgacccaagcacggattgaggcaatggcggaaggtttgagacagattgcagggctttcagatccgatcggggaagtcctttccatgaaaaaccggccgaatggactgcgtatcgggaaaaagagagtgccgctcggtgttgttggtattatttacgaatccagaccaaatgtcacagcagatgcgttcgggctgtgttttaagaccggaaacgcagtgatcctgcggggaggcagtgatgcgatcaattccaacaaagcaatcgtacaggtgatcaaggccggacttcgcaaagccagattatcccaggatctgatcctacttgtagaggatacgagcagagcagttgccacggagatgatgcgcctgcatgagtatattgatgttctgattccaagaggcggtgccgggttgatctctactgtggtgcagaacagtacagtgccggtaattgagacaggaaccggaaactgtcatatttatgtggatgagagtgtggatgtaacgatggctgcggaaatcattgaaaatgcgaagacacagcgtcttggtgtgtgtaatgcatgcgaatctcttgtgatccacgaaaatgttttagagcaggcattgccgggtattgtaaagcgcctgaacaatcatcaggtggagattcgcggagatgagaaggcgagagcagtctgcacagaaattctgcctgcatcagaagaagattggggaatggaatatctggatgccattatttccgtgaagacagtggcctctctggatgaggcaatccgccatatcaaccggtataataccggacattccgaggcgatcattacaaaagattatgacagtgcgctgcgttttcaggatgagatcgatgcagcagcagtgtatgtcaatgcgtccaccagatttacagatggatttgaatttgggtttggcgcggaaatcgggatcagtacgcagaagttgcatgcaagaggaccgatgggactggaagcgctgacgacaacaaaatatattattttcggaaacggacagatccgaaaataaaaaaataaaaaaccatgcttgcataatatacaaaaaggatgtatacttatgcaaacgtggtttttatttatacagaaatatgaataaaatacaaaaaaatgcatactaaatgaaaaaaatatgaataaagtgagaaaggagctttcagaatgataaaagcaggaattattggttcgacaggatatgcaggaggagaactggtccgtattctgacaggacataaagaggcagagatcaaatggtacggttccagaagctatatcgatcaaaattatgcagatgtataccgcaatctttttcaaatcgtggatgcgaagtgtatggatgataacatggacgcgctggcagatcaggtggatgtgatttttacggcaaccccgcaggggctgtgtgcatctctgatcaatgaagagattctgtcaaagacaaaagtgatcgatctgagtgcagattttcggatcaaagacgtgtctgtctatgaagagtggtacaaaatagagcataaaagtcctcagtttatcgaagaggcggtgtacggactttgtgagatcaaccgggaaaagatcaaaaatgcaagattggtagccaatccgggatgttacacaacctgctccattctcacagcctaccccctggcaaaagaaggtctgatcgatatgaacacactgattattgatgcaaaatccggaacgtcaggagccgggcggggtgcaaaagtggcaaatctgtactgcgaagtgaatgaaaatatcaaagcatatgcagttggaagtcacagacataccccggagattgaagaacagctcgggtatgcggcgaatgagaccgtgaaattgagcttcacaccgcatctggttccgatgaaccggggaattctggtgacggaatatgcatcgttgaaaaaggaagtcaccaaggcggaaatccgggagatttatgaaacttattatggaaaagagccgtttatccggattctggatgacggagtctgcccggagacaaaatgggtggaaggaagtaactatgcagacattggctttcagatcgatccgcgtaccaaccgcataattctgatgggagccatcgacaacctggtaaaaggagcagcagggcaggcggtacagaatatgaaccttctgtttggatacaaggaacaggaaggtctggaactgattccgatgtttccgtaaagattccataggcagaggtgagaagatgattcggacaatgacaattgaagattatgaacaggtatatgcgctctggaagaagatacatggttttggattgcgaagtatcgatgattccagggacggtgtggaaaaatttttaaaacgaaatccgacaaccagtgtcgtggcgacagaagacggaaaaatcgtaggtgcgatcttgtgcgggcatgacggaagacgaggctgtctgtatcacgtctgtgtggatgaagcgtaccgcagacgtggaatcgggaaagcaatggtcgtacagtccatggaggctttaaaagaagaaggaatcagcaatgtatctctgatcgcatttacgcagaacgatatcggaaatgcattctggaataccatcggatggaatgagcggcaggatttgaactattatgattttgtgttgaatacagaaaatattacagcatttaatgcgcagtaaatgaggaggcatgcacgatgaaaaaaataacaggcggagtcacagcagcaaaaggatttgaagcagcggcagcggccgcagggatcaaatatgaaaacagaacagatatggcacttgtatacagcgtaaaaccgtgcaaagtggcaggaacttttacgaccaatgtagtaaaggcggctccggtgaagtgggaccgccggattgtggaatctaagatcaagtctcaggcagtgatcatcaactccggaatcgcaaatgcctgtacaggagaagaggggatgcactgttgtctggagactgcgaaagctgcagcagaggctcttgaaattccggcagacggtgttctggttggctcgacaggggtgattgggatgcagatgccgattgaaaaattaaaaaagggtattcagattctggcaaaagaaaaacagtcgggggcagtggcagcaaatgcggcggcaaaagcaatcatgaccacagatactatggaaaaagaagtggcagtgaccgtggagattggagggaagaccgttaccattggagggatggccaaaggatcaggtatgattcatccgaatatgtgcaccatgctggcttttcttacaacagatgcggtaatctccagaaaagcgctcaaagcagcgcttcgcgcagatgtagaagagacgtacaatatgatctctgtggacggagatacttcaacgaatgacacagtacttcttctggcgaacggaatggcagaaaatccaaagatcaaagagggcacaaaagggtttgaactatttgcagaagcgctgcatgaggtcaacgagacactggcaaagaaaatggcaggagacggagaaggcgccacagcattgttcgaagtgacggtaagaggtgcagatacgaaagaacaggcgaaaacactggcaaaatccgtggtctgctccaatctgaccaaagcggcgattgccggtcatgatgcaaactggggacggatcttgtgtgctatgggctattccggtgccgaatttgatccggagaaagtagatctgtatttcaaaagcagcgccggagagttaaagatcatcgaaaacggagtagcgctggattacagtgaagaaaaggctacggagattttatccatgccggaggtgacagccatcgcagatctcggacagggagaggaaacagcaaccgcatggggatgtgatcttacccacggctatatcgatatcaatgcggattaccgcagctagtacacggtatattcagtaaaaaaacaggcaggaggagtgagaatatgaatgaaaatatgaatcaatatctggagaaggcgaaagtactgatcgaggcactgccgtatatccagcgttttaaccgaaagatcattgttgtaaaatacggcggcagcgccatgacagatgaggcgttaaagcagaaagtaatcgaggatgttaccttattaaagctggtcggcttcaaaccgatcattgtgcacggaggcggaaaagaaatcagtaaatgggtcgaaaaaatcggcaaagaaccgcagtttatcaacggacttcgagtaactgatgaagagactatggaagtggcggaaatggtacttgggaaagtgaacaaaagtctggtacagcttctggaaggacagggagtacgtgccatcggaatcagcgggaaagacggcggacttctgaatgtggaaaaaaaatattccaaaggagaagatatcggatttgtcggggagatcaaaaaagtagatgcacagattttgcatgatcttctggaaaaggattttcttcctgtagtctgtccggtaggaatggatgatgaattccatacatataatatcaacgcagatgatgcagcctgtgccattgcaagagccatgaaagcagaaaaactggcatttctgacagacattgagggggtatataaagatccgaaggatcctgctactctcatttccgagcttttggtaaaagaagcaaaacagctgatcgaagaaggctatatcggaggcggaatgcttcctaagttgaataattgtattgatgccattgaaaacggcgtttccagagtgcatattttagatgggcggatcccacactgtctgcttctggaattctttacaaacaaaggaatcggtacggcaattttacatgaagaagaaagcaggtattatgatggtgaatgagaagatcaaagcagcagaagaaaatctaatacacgtatacaatcggtttccaattgcgctggagaggggagaaggtgtttatctgtatgacacgaacgggaaaaaatatctggattttgcagccggatttgcagtgtcgggactgggatacggaaatcagaagctgaatgcggcattaaaattccagatcgatcagctgtatcatacgtccaacctgtattatcataccaattgtggagaggcagcacaaaaactgaaccggatttcggggatggaccgggtattttttacgaacagcgggtctgaggcaaatgagggggctttaaaagcggcaagacgatatgcgtataataaaaaatcgggcagatatcagtttatcgccatggaaaattcgttccacgggcgcagcttcggcgccgtttccgtgactggacatactgcgtatagagaaccttttgaaccgatgctcccgggagtttcttttgcagaattcaataatctggacagtgtgaaagcgctggtgacggatcagacctgcgcaattattttagaaccattacagggggaaggcgggatcaatcttgctacacaggaattcatggaaggaatccgtaagatctgtgatgagaacgatatcctgatgatctgtgacgaagtgcagtgtggaatgggaagaaccggcgctatgtttgcatggcagaaattcggggtaaaaccagatattctgactatggcaaagggaattggaaacggtattccggtgggagcctttgccatgacagaaaaagtggcacaggcatcgttaaagccgggagatcacggggcaacttatggcggcaacccgctggcatgtatggcagtcaagacggtgatcgacatttttgaggaagaaaagatcgtggagcatgtcaatgaagtgtcagaatatcttacggatcgtctggaagaactggtacaacatgtggatggcgtgctggaacgaaaaggaaccggactgatgcagggtattgtgttaaagcaaccggtcgcgcaggtaaataaccgtgccattgaggaaggacttcttgtgatccaggcacagggcaatgtactgcgtctggtacctccgcttatcattgaaaaagagcatgtggatgaaatgatcccaaaattgacaaaagcattgacagagtgataaatgaaaaaccaggattcgggaaatactaaaagaaattgagaaaaatttcaggaggtagaaaacgatgactggttttttaattgcccttctttccggggcgctgatgagtgttcagggtgtatttaatacacaggtaacaaagacaaccggattgtgggtcagcaatatctgggtgcagttaagtgcttttctggcatgtctggcggtatggtttctggcaggaagagcggatgtgacggcacttgcgaaggtggaaccgaaatatatgctcttaggaggcgtgatcggagcagggattacctggaccgtagtaaagagcatggcatccttaggaccggcaaaagctgcacttctaattgtaatctcccagctgatcgtggcgtatgtgatcgagcttctggggatgtttggtgtggaaaaatcgccgtttgcattccggaagctggcagggcttgtcgtggcactgatcgggattgcaatcttccagtgggaatagagcgtcagaattgtaataaatgcgtaacaggattgtaaaaatgttattgtaattttgagcgtttttcgttacaatattactgtccgatataaaaggggattccttgcgtctgagattgtgaggaaatatgagggacagatggaaaaagaaagcttattatacagttgttatgatcttgactgcgttgtgcctgatcagcgggtgcgggcaagagtcgggggaagaacttaaggagatttctctggaggagacacaggaagagaaagaagagtcctctgcagaagaaaagaaggttgaagacaaagaaccgaagaaagagacaaagatttttgtctatctgtgcggagcagtcggaaagcccggcgtgtatgaagtgggcagtgacgacaggctttatgaagtcattgccatggcgggcggactgacagccgaggctgcacaggatgcagtgaatcaggcaagggttgttgtggatggggagcagatctatattcccaccaaagaggagatgcagacacaggcagcagcacagccgggggaaagtccggcagaaggaacaaagccgcaggatggaaaagtcaatcttaatacggcgacaaaagaagaattgatgacgttgtccggtgtaggagagtcccgggcggacagtattattgcctatcgggaagaaaacggcaggttccagaatacagaagagctgatgcagatcagcggaatcaaagaaggtctgtataataagattaaagataatattacagtatagcaggaagttgaaggaagaaagtatgagcaagaagaagatcttagtagttgacgatgaaaagttgatcgtgaaagggatacggttcagtctggaacaggacgacatggaggtggactgtgcctatgacggtgaggaagcactgcagtatgcaaagaactgcgagtatgacctcgtgctgctggatgtgatgctcccgaagatggatgggtttcaggtttgtcaggccatccgtgagttttccgacatgccgatcgtcatgctgactgccaaaagtgaggatatggacaagatactcgggctggagtacggagcggatgattatattacgaagccgttcaatattctggaagtcaaggcccggatcaaagcgatcatgagaaggactgcgagaaaagaggagagtgcgcagactgccaagattctggtcaaaggcaatatgcggatcgactgtgagagcagaagagtgtttatcggagagcgtgagatcaatctgacagcaaaagaatatgatgtgctggagcttcttgccatgaatccgaacaaagtctacagccgtgagaatctgctggatcttgtatggggtgtggattatccgggggatgccagaacagtggatgtacatatcagaaggcttcgggagaagatcgagctgaatccgagcgagccgaagtatgtacacacaaaatggggggtaggttattatttccagggataaattacatatcagagtaaagaatcatatatttaaaagcatgcggttctggctgatcgtgttgtttgtggtgtttgggctgatcccatgtctggcttcttatgtctggacagtgaaaacatctgagcagcgtgccatttcggtcagaacagcagaaattcagaatcaatgtactattctaagcaatcagctgaacagttatcagtatctgaccaacccgtcttcagaagtgatcgatgcaaatttaacccaactgaccaatatttataacggacgcgtgatgatcatcaaccagaacctggatgtgatcaaggatacgtatggtctggatgaaggaaagacgatggtatctgaaaatgtgatccgttgtctcaggcagggcaagagcacgagctactatgacaaaaagaaccggtacgtcgaggtaaccgcaccggtcatttcggaagaaaaggcagtgacaggagtgatgctggccagtgtttctatggatacggtcctggatgggacccgtatgctgcgcgcacagggcggcgcagttctgatcgtagtctttctggtcgtattgtcccttgggatacttgtggcaggatggtttgtacgtccgcttggaaggatcactgcgtctattgagaatgtgacagaagggtatgaaagtgaatggctgcatgtagggacattttcggagacagggcagctgtctgatgcgtttaacaagatgctgggaagattaaaacagctcaatgattccagagaggagtttgtatccaatgtctctcatgagttaaagacaccgctgacatccatgaaagtgctggcagattccctgcttgcccaggaaaatgtgccgattgagctgtatcaggaatttatgggagatatcgcaaaggagattgatcgggaaaatgatattatcagtgatcttctgacgctggtcaagatggacaagacagtacagggactgaatatcagacagatcaatatcaatgagcttctggagacaatcttaaaacgactgaagccgattgccgataagaaaaaaatcgaggtggtactggaaagcttccgacccgtttctgcggagatcgatgagatgaagctgacactcgccatttccaatctggtagagaatgcgatcaaatataaccgggatgaaggatgggtaagagtttccctgaatgcggatcacaagtacttttatgtgaaggtgatggactccggcattggaattccggaagaggatcaggcacatatttttgagcggttttaccgggtggacaagtctcattcgagagaaatcggaggaacaggtctgggacttgccattgcccgtaatgcagtgatcatgcacagaggatcgatcaaagtttacagcagtaagggagagggaaccacgtttaccgtccggattcctctgacctatgcagcataagggggagcagatgaaaaaagtcagaaaaattctcctcatctttctgggaatctgtcttgcgtgcacgacagtttcctgtgccaaacgtacggaggtaaaaaaaggagattcttatatttattgtttaaacagtgacaggaccgggcttcagaaagtgtcctatgagagcaaagaaaaggatccgctcaaggcggcaaaagcaatgataaaagagttgaaaaagccgtctgaggagattgagtatacgccgccgattccgaaggatgtgaaagtgaagcgttatgaactggagggaggaatcctgtatctggattttaatgcaaaatataaacaaatggataccgtggaagagactctggtgagagcggctctggtaaaatctttagtcaggatcgagggaatcaacagtgtctggatcaaagtggaaggcgcggatctgactgacagctcgggacaggtactcggatatctcaatgaagatgattttgtgcaaagcgagggcgcttcgccgagttcgtatcagacagggacgctcactttatatttttccaatgaagcaggagatgctttggtggagcagacaatggaagtccgctataacagcaatatttccagggagaagctgatcgtggaaaagctgatgaaaggcccggagacgtcggccgcaaaagcaacgatcaatccggataccaacctgctgagtgtgacaacaaaggatggaatctgttatgtgaattttgataagacctttttaaaaggtgcctatgatgtcaaaccgcaggtgacgatttattctttggtcaattcactgacacagggaaccggagtcaggaaagtgcagatatccattaacggcgaaaacgatgtcaaatatatgcagactgtagatttgagtcagccattggaggctgacctgggatggaatgaggagaagaagtagttttgagaaaacgaccgctttgtacggcggcagtggcagttctgattctgctggcagcagtgaacatctggtttgaatccgcgatttcaaatccgtgtacactgcgccggatcatcccggatgcttcacaggtgactgtgacagggcaggtgaagcggtgggaggaaaagcctgattacaggatattttatctgagagactgccaggtgctgcaaaaagagaataataccaattctgacaggcaatctgtcaacaagcaattcaaagaacaagtcaaagcaaaggtgctgcaagagccggagcttctaatttatatcgaacaggatcaaaaagaaactcaaacaatcaaacttggaaatcaaatacagattcagggggaactttcgtattttaaagaggcgagaaatcccgggaattttgatcagaaattttattatgaaaaacagggacttcacgcaagtatatgggtgaaaaactgccggatcacagatcaggaaacgtggaaattccgggaatggctggcaaaattaagaagaaactggaagagacttttagtcagtcagatgggagcacgtcacggaaacagcatgagcgcgatcttactgggagagaaaagtgaactggatgcccagatgaaagcattgtatcagaaaagtgggatcggccatattctggcgatatcaggacttcatatgtcatttatcggaatgggattttacgggcttttacgcagagtgggatgtcctgtgaaaccggcgggagtgctgggaattttgtttttgcttggctacacggttatgatcggaggcggggtatctgcaatccgggcatttgttatgtttggcatccgggtaggagcagatctgtgcggcagagcgtatgacatggctaccagtctggctgtggcagcggcgctgattgcgctggagagtccgatgtaccttcgggatgccggatatctgctctcttttggagcggtgcttggaatggcggcagtgtatccgttaatgatgagacagggaaaaacaaagtcaaagatcctgcaaagctttcaggcgagtcttgcggtcaatctggttctttttccggtcatgctttctttttattatgaatttcccccgtattcccttcttttgaatctggtgatcattcctctgatgtctgtcgttctgggcgcaggacttctgggttcttttttgtgtctttttttcaaaccggcaggaggcgctgtatttcttttatgcaggggaattctcaatctgtatgaatggagctgcaatttgagtatgaaactgccgttttccagaattgttaccggaaagccggaagttagctggatcgtgctgtattatgcagtattgcttctggtctgtctgtactggatgcttcgaaaagagaaaacaggaaaaacctgttttgcgtggggaatgctggcagcggccggaatctgtctggcagcaagcggtcagatgaaacatcacggggtgtttcaggcgacgatgctggatgtgggacagggtgatggaatttttctgagaacacccaatgggagaacctgttttgtagatggaggcagcagcgatatctctaaagtcggggagtatcgaattgttccgtttctggaatctcagggagtaaaagagctggattatgtttttatttctcatggcgatgcagatcatatgagtggaatcgaggaaatccttcagaatcagacccttggagtacgaatcaaaaatctggtgctgccgccggtaaggcttcatgatgatgcgttgaaaaggctgggaaaaacggcaaaggaaaatggcacgaaagtatttggaatggaggcaggtcagcagatgagcctgggagagatgagtctgacttgtatggcgccttcacaggaatatcagggtgagactggaaatgcagcgtctatggtgttgtggatggaatggaaaaatctggagatgctgttaaccggagatgtggaaggagagggagaagtgcagctcacagagtggatgagagcacatggaaaaacaacgtgtgatattctgaaagccgcgcatcacggctctaagaattcgacactgccggaatttttacagcagctgacaccgaaatatgcatggatttcatcgggaatcggcaaccggtacggacatccggcaaaggagactgtagagagactcagtgaaaaaggatgcgaattgtatgggacgcaggagtacggggcagtcaccttaaagataaaagtggaaaaagctgtgatagaaacattttgcaaaaagtaaaagtttccgatataatagaaattatgaaaagtttgaatgaagatttaaaaacaggacaatttaagcagatatatcttctttatggagaggaaaattatctgaagaaacagtataaggagcggtttgtcaaggcaatgcttcctgatggcgatacgatgaattacgcctattatgaagggaagggcgtggatatcaaggaagtcattgacctggcggaaacgctgcctttttttgcagagcgccggttgcttgtatttgaaaataccggatttttcaaaagctcgggggtggatctggcagattatgttaaggaaatgcctcagaccacatattttatttttgtggaggaagaggtggacaagcgcagcaaactgtataaggcagtgaaggcaaagggacatatcgtggagcttccatttcaggatgaaacgacattgaaacgctggatccttggcaatgtcaaacgggaaggaaagcagatgtcggaggcgtcggccggctactttttaggcaaggtcggaaccgatatgcagaatatccagggagaactggaaaagctgttctgctatacgctgcaccgggatgtgatcacaccggaggacattgacgcagtctgtatcaatcagattggaaatcatatttttgagatggtcaacgcagtggcggagaagaagcaaaggagagcattggatctctattatgaactgctggcgttaaaagagccgccgatgcggatcttgtttttgctggtgagacagtaccggatcttgtttcatgtgcagtcgctgcaggtgaagggatacggaagaaaagaaattgcggcaaaggcaggacttcacccgtttgcagccggaaagtatatggagcagacaaggtattttaagatggaagaactgcgtgccgtactggaggagagcgcggaactggaagaacgagttaagaccggacggctgacagatacgctggcggtggagctgtttttggtaaaatactcgtcctgaacgacagatattcttgtcaaaacaagaaaggcatgatagtatatctttgcacaaaaaacagaaaaacattacaataaaagcaaatagaaaaagacagagttactggaggaatgaaagtgtcatcaattgatcagaataaaatacgaaatttttgtattatcgcacatatcgaccatggaaaatctacgcttgcagaccggatcatcgagaagaccggacttctgacaagccgtgagatgcagtctcaggttctggataatatggacctggaaagagagagaggaattaccattaaagcacagactgtgcgtacggtatatcaggcgaatgacggggaggagtatatctttaacctgatcgatacaccgggacatgtagactttaactatgaggtatccagaagccttgcagcctgtgacggagcgatcctggttgtggatgcggcgcagggagtggaggcgcagacgctggcgaatgtgtatcttgcgctggatcatgatctggatgtatttccggttatcaacaagatcgatctgccgagtgcggagccagatcgtgtcaaagaagagattgaggatgtgatcgggatcgaggcagatgatgcgcctctgatctcggcaaagacgggactcaacatcgaggaagtgctggagcagatcgtgaagaagataccggcaccggagggagatccgaaagagccgttaaaagcattgatcttcgattcggtttatgatgcctacaaaggggtaatcgtattctgtcggatcaaagagggaagcgtgaaaaaaggaacaacgatccggatgatggcaacaggagcccaggccgatgtagtcgaggtcggttattttggtgcaggacagtttattccttgtgaggaattaagcgccgggatggttgggtatatcacggccagcttaaaaaatgtaaaagatacccgtgtgggtgatacgatcacagatgccgcacgtccttgtgcagaacctctgccgggatataaaaaagtcaacccgatggtgtactgtggactgtatccggcagatggagcaaaatatccggatttgcgggatgcactggaaaaattgcagctgaatgatgcagcgctgcagttcgaggcagagacttccgtggcccttgggtttggattccgctgtggtttccttggacttctgcacctggagattgtacaggagcgactggagagagagtacaatctggatctggtgacaactgcgccgagtgttatttataagatccataagacaaacggagaagtgatcgatctgaccaatccgacgaatatgccggatcctgcggagattgaatacatggaagagccgatggtaaaagcagagattatggtgacttccgagtttatcggtgcgatcatggatctgtgtcaggagcgcaggggtgtatatcagggaatggagtatatcgaagaaaagcgtgcagtgattcattatcatctgccattgaatgagattatttacgatttctttgatgcgttgaaatcccgttccagaggatatgcgtctttcgattatgagatgctgggatacgagcagtcagagctggtaaaactggatattctgatcaataaagaagaagtggatgcactttcctttattgtacacagtgcaacagcatatgagcgtggaagaaagatgtgtgagaagctcaaagaagagattccaagacagctttttgaaatcccgatccaggcagcagtaggaagcaagatcatcgcaagagaaaccgtcagagcaatgcgaaaagacgtgcttgccaagtgctacggcggtgatatttcccgtaagaaaaagctgttggaaaaacagaaagaaggaaagaagagaatgcgccaggtcggaaacgtagagattccgcagaaagcgtttatgagcgtattgaagttggatgaaaattagagaaatacaaaaaacctcgccaaagaaatggtgaggtttttgttttcccatacatttgattattctgcagcattcacaatctgtttcatcaattcataacatcctttttcctgaataaaagtaaagtcctttacaacagtttcttcgagtccggcaagtgttgtcagatcttttccccagaaggacgtttcgcttaagacggcgtgaacatagtcagcggcagaatcgtctttgtgtgcgtcatagaattccagaactttcggatcgtcagaaatcggatactggtttttgacatttcgatccccggtaaaagttgcgtccacaaatccaatgcctttataaaatgccaggtaaaaagcgagggaggcactcaggcaaggaggaacctgccctgttttttccaggtatccttccagagaaggaagcacacgggctttccattttgcagtcgaattcagagaaatggagagcagtgcatgatcgataaacggattttggaagcgatccgtcacggacgcagcaaagctcatcagttcttcttccggcagagtcagtgtcggaatgatctctttatagattgcctgattcatgtaaccacggatgacatcatccttcatacagtctctgacaatgtcctgtccggcaaggtaagcaccgagtaccatggaagtgtgagcaccgtttaagatgcggactttccgctgtttgtatggtttgtggtcatctgtgatcaggatcggaagatttgccgtatcacaagggaattcctctttgatcgactgaggtccttcgattacccagaatccaaagatttcaccggtgtttaacactttgtcaatatagccgttttcctgatttaaagcgtctgcatcagagcgtggataaccggttacaatccggtctaccaaagtagagcagaagaggtttgcctctttgatccattcagtgaaagcttcgcccagattccagtcggcagcgtgttttaagacgcatttttccagttcttttccgttgttgtcgatcagttcgcaggagaggatgataaatccttttttgacatctccctgaaatgcttcaaaacgtttatgcagaaactgtgtcagctttgccggaaaactgtttgccggagtatcagtgaactgacaggacggatcatatacgattccggcttctgttgtattgcaggtgatgaaacgcagttcgggattttttgcacattccataactgcctcatagtcgctgtatgcatttaagcagcggctgatacaggagattacccgtttggaagagacttcctgtccgttttcggaaccacgtaaatacagtgtgtagagaccttcctgttcattgataaaatctcccacatccggagttgtgaattttggaattggctgtaccagtacaaccttggaattaaaatttgcagtttcattcattttatcgataaagaaatcgacaaatgcgcgcataaagtttccttctccgaactgtaaaacgcgttccggagcttcgtttaataaatatccatcataatttaaatcctgtaaggtctggtaatttaactgtttcatagcaaaaattatcctttctgaaaatcatattcatctattgttacagagtcacaccctgtttgaaaatcgccatatcgtggaatcctgcttcctcggctttgaccggacgtccggaagcaacctccagaacatagtcaaaaagagattctcccatctccgggatagagccgccgtctaccagcgcaccgcaattgaagtcgatccagtttttcttattctcatagagttttgtattactggatatttttacagtcggaaccggagaggcaaaaggagttccgcgtcccgttgtaaacagtacaatttgtgcaccggaagctgcaagtgcagtagaggctaccaggtcatttccgggagcgctcaaaagattgagtccttttgtctgcacaggctgtccataggagagcacatcagcgaccggggcagaaccggatttctgggtacatccaagagacttatcttccagtgtggagatacctccctttttatttcccggagaagggttctcgtagatggtctgattgtggcttttaaagtagtttttaaaagaattgatcaggtctactgttttatcaaaaacagcttcatccctgcagcggttcatcagcagagtctctgccccgaacatttccggcacttctgtgagaatcgtagtaccgccgcgggcgatgagcagatcggaaaaagcaccaactgtcggatttgcagtgattccggataatccatcagaacctccgcatttcattccgatgacaagctctttgcaggaaattttttctctctggaaggtagaggcataatcacagagctgtctgatgcaggcaagagatgcctctatttcatcctccacttcctgagcgaccaggaatttgacgcgatcttcatccacggttccgatatatttttttaattcctcaatattgctgttttcgcatccgaggccaaggaccagaacgccggctgcatttggatgtcggatcagatctgcaaggatctggcgggtgtgctcctgatcatctcccatttgagaacatccgtaaggatgcgggaatgcgacgatcgcatctacgctgtccggctgaaattcttttgccctggcagcaacagaggttgcgatactgttgacacagccaaccgttgggatgatccagatttcattgcggacaccggcttttccgtccttccttctgtatccttcaaagaaccgttcttcctgtggttctaaagaagtgaattctttctgataagaatagtgaagaagatctccaagtcctgttttcatattatgagtgtggatccaggaaccggccggaatatcttctgttgcataaccaatcggggaaccgtatttgatcacggcattcccggcgctgattttttccagtgcaaatttgtgtccctggggaatgtcttctaataaagtatacatgcgcccatccagatttaatacgctgtccttctttaaagaagtgagtgcaactgctgtattgtcttttggatgaatctgaataaaagtgggtgttgaatccataaaaacctccataatgataatagaaagaaaataaaaatgtaagcatttacaattaaaatacaacctttttgattacaagtcaatggaaaaatgtacaaaaaatcaagaaaaatattgtgcaaaacgctaacaaaagagtgattgactttttattaacgaagaaatataatctataaatgtaagggcttacaagaaaacaaggaaaataacaaatcaacaggaggaataagagatgaaaccatttatggatgaagaatttctgctgagcactcctacagcacagaagttgtatcatgattttgcagaaacaatgccgattttggattaccattgccatattaatccggaagagattgcgaaagatgtctgttttgaaaatattacccaggtatggctgggcggagatcattacaaatggagacagatgcgttcgaacggtgtggatgagtactatatcacaggtgatgcgcctgcacgggaaaaatttcaaaaatgggcggaaacgctggaaaaagctgtgggaaacccgctgttccactggagtcatttggaattaaagagatattttggttataatggcgtattaaatggagaaactgcagaagaggtgtggaatctctgcaatcagaaattgcaggagccatccatgagcgtacggaatctgatccgccgttctggtgttactttaatctgtacaacagacgatcctgcagacagcctctactggcataaagaactggcggcagacgatagctttgaggtacaggtacttcctgcgtggagaccggacaaagcaatgaatatcgaaaagccggattatgcagaatatctgaaaaaactgggacaggctgcagaatgtcagatcgaaacatttgcagatttaaaaatggcattaaagaagagaatggatgcatttgaagaaatgggatgtcgtgccagcgatcatgcgctggaatatgtgatgtatgtgccggaaacagaagaaaatctggaaaagatctttgcaaaacgcaaacagggtgaaatgctgacaaaagaagaagaactgaaatttaaaacagcatttatggcatttgcagcaggggagtatacaaagagaaactgggcaatgcagcttcattatggatgtaagagagacaacaatgcagcccgttatgcacaacttggaccggataccggatatgactgtatcaataactatgcaccgtccgcacagatggcagattttctcaatgcattgaacgagaaaaacagccttccaaagacgattatctacagcctgaatccaaatgacgatgaagccatcggaacgattcttggatgttttcaggatgcgggtgtggcaggaaagattcagcagggatctgcatggtggttcaacgaccacaagactggaatgatcaaacagatgacatctctggcaaacctgggacttcttggaaatttccttggaatgctgacagattccagaagctttttgtcttattccagacatgagtattttagaagaattctttgtgagctgatcggaggatggatagaaaacggagaatacccggatgatgagcggatgctgggaaaaattatcaaagacatttcctataataatgcagtgcgctattttgggtttgagttgaaagaagtttactaaaggagaggatggaaactatgaaacagaatcgtaaaattacaccgattacccgtttcgcatatggaacaggaaatcttttgggaagtggtgccctggcaatcagtggttcctggctgctgtatttctataccacattttgtaatatgccaatcgcacaggcgacgttgatcttttcgctcgcaacgtatctggatgtgataatgaatccactgatgggatttatttctgacagtttttataaaacaaaactgggacgcaaattcggaagaagacgtttcttcattatgattggaattccgctgatgtgtctctaccctctgctgtgggtaaaaaatatgaatttctggtattatctgtgtacctatattatgtttgaaattgtatataccggagttatgattccgtacaatacgcttcctgtagagatgaccagtgattttgcacagcgtacatacctggctggttcaaaagcgatgtttggtaagattgcaaactttttgggagccgctcttcctgggctgtttatcggaatttacggacaggattctccgacaccatttttctgtacaggacttacctatggagcaatcctgattgtttctatgattcttctgtatttcaattcctgggagcgtccgtatgaggaagtggaagatgagagtgtggcaaatgtatttgaaggattcaaaaagttgttcatcgacatcctttctacgcttcgcatccgtacattccgtgaccatcttggaatgtatctgtttggatttggagcagaatggcttttcacagcgacatttacatatttcgttgtatatgtactttcaagaccatctacatttgtgtcagaaatgaacagtttaagcagtatccttcagctgatttcgactttgatttttgtgaaaatcgtggcgaaaaaagggttcaagaagccgtttatctgggcgcttagcattgtaatcgcagcaatcctcggatatattggagttgcagtactcaatgttccgcatatgacagttctgatcattgcgattgtgatcgtgtttggtctgggtacaggcggtgtatattatattccatggacatcctacacatttatggcagatgtggatgaagttgtaacaaaccgccgtcgtgaaggtatttatgcaggggcgatgacaatggccggaaaactgattcgtgcaagtattgtttctattcttggatttacattggcagcgttcggatttaaagaaggagcaagtgtacagccggagtccgcatgtaatgcaatcattggagtgatgctctttggatgctgtggactggcacttctcggaattatctgttctgtcaagatgaagctgacacaggagacacataaagtggtcattgcagagcttgatcgtatccacaatggcggaaaaatgtcagatgtagatccagaggtgaaaaagacgctggaggagctgacaggagttccatatgaaaaatgctttggaaataataatatcggatataaagataaacatcataaagcagtagcagaataaagaacaaaaaggcgtttccggatggaggcgtctttttgttctaaaaataaagatatacaaaaaatatagagttatgtataatccaattataaatacaacaggaacggatatggaaggagaaaaaacagaatgaaattaaaaaatatattgattgttgtgaaagatattgaaaaatcaaagcagttttatcatgatttgtttgggcttgatatggtgcttgacaatgacggaaatataatcttaacagaaggtctggtactgcaggaagaaaaaatctggaagaaattccttgaaaaagaaattatttcagagagcaattcctgcgaactatattttgaagagcgtgagatagaaaaatttgttcaaaaattagaaaagttgtatccatctattcagtatgtcaatcgtcttacgacacatagctggggacagaaggtggcccggttttatgatctggacggcaatctgatcgaggtgggaacgccgatgtaagtcttgtttgtgaaaaagagcagacagtgtatggtggcaagttgcaaaaaaacattgcgaaagaatcaaagagaactggataggtaaattatgatcggggtgtcgatttatagccggatttaatcaggttatgagtcggcatttcctttatcctacaaaaccaactaaatatattgacattgtaggaaatgagtggtaatatgcatacaacaaaatgaaaggagaaatgtaatggactgggaaattcttttgaaataccttcccatgtatgaaagagcggcatggcttacaatacaaatcggctttatgggcgtcgcaggtgctacggtactgggattgatctgtgcagtgatacagtatgagagaattcttttttttaggcaaataacagcgatgtacatagaactcagcagaaatacaccacttcttgtgcaattgttttttatttattatggattgccgaagattggtatacagacggatccgaagatctgcggaattgtaggccttgcttttctgggaggcggctatatggcagaaacatttcggagtggtctggaatctgttgcggacattcagatagacagtgcgataagcctggggatgaaccgggcgcaggtgatgtggtatgtgatcattccgcaggctgtttctgtcagtgttcctgcatttgtggcaaacattatttttttgttgaaagaaaccagtgtattcagtgcaatcagtttaatggatttgatgtttacggcaaaagatttgatcggactttattataaaacgacagaaagcctgtttttgctggttgtattttatctgttgattttgcttccggtatctgtagcaggaagtcttttggaaaggagagtacgctatgccggatttgggaattgatgtcttgctgaaaggacaaaatttaatcagattgcttgcaggtcttggcacagcgctgcagattagtataatatcggtagcgatcagtgttccttttggaattgtactgggagtattgatgacctggagcaatccgcttataaaagtaattttaagaatttatcttgagattgtcaggattatgcctcagatggttttgctgtttcttgtgttttttggtacgaccagagcatttggatgggatttgtcgggtgaaaatgcatcgattatcgtattttcgttctggggaaccgctgagatgagtgatcttgtaagaggggctttgatcagtgttcccagacatcagtatgagagtggagaagcgctggcgatgaacagggtgcagatctatcgatacattattattccgcagacattaagaaggctggttccgctgtcaatcaatctggtgacaagaatgatcaagacgacaagtctgatattgatggtgggagttgtagaaattttgaaagtcgcacaacagatcatagaagcaaatagaatgtccagtccaaatgcagcatttggagtttacctggttgtgttgttgctgtatttcatggcatgctggccgatcagtatatttgcaaaatatttggaaaagagatggaggggatgatctatggcagagacattgcttacaataaaacatctggtcaagcaatatggtgatcatatcgttttgaatgatatcagtttggatatcaaaaaaggagaagtgattgttgtagtggggccgagtggttgcggaaagagtacactgcttcgatgcgtcaatgcattagagcccattcagggcggagtcattaaattaggagatattccgatagaagcgaaaagcaaatcgctaatcagtatcagacagaagatcggaatggtgttccaaagttatgatttatttccgcatcttacagtgttggacaacattctgttagcaccgatgaaagtgcagaaacgaaaaaaagaagaggtaacagaagaggcaatgaaacttctgagaaaagttggattgcaggagcaggcaggtaagtttccaagagaactgtccgggggacagaagcagagagtggcgattgttcgtgcattgtgtatgcatccggagattctgctgtttgacgaagtgacggcagctctggatccggagatggttcgggaggttctggatgtgatattgaatctggcagcacagggaaacacgatggtcattgtgacgcatgagatgcagtttgcacgtgctgttgcagacagagtcgtgtttttggatgagggtaagatcatcgaagaggaaccgccggagatattttttagaaatccgaaaacagaaagagcaaaacgatttttgagtacatttacatttcacacagtaaaacgttaaatcaagagaaattataacagatgggagattatgattatgaaaaagcagaaatcaaaaaaagtagcagtacttgcagcggtcgtatccacagtttttgcagtgacagcgtgcggcagcaaagcggaggattcttcttcaaaagcagaaaaatcagatgctgtttaccgcacattacaggaaatcaaggaagatggaacaattaacataggcgttttttctgataaaaatccttttggatatgtggatgagaatggaacatatcaaggttatgatgtatattttgcgaaccggatcggggaggacctcggggtagatgttaactttgtatccacggaagcggcaaatcgtattgagtatcttcagacgggaaaagtggatctgattctggcaaactttacagtaacagatgaacgaaaaggggaagtggacttcgcattgccatatatgaacgtagcgctgggggttgtatcaccggacagtcatgtgatcaagagtctggatgattgggacaagggtgatcagatgatcgtgatttccggcacaacagcagaaacttatctgacagagaattatccggatattccgttacagaaatatgactcctatgcaaccgctaagaatgcactggaaaacgggaatggagcagcatggacaaatgataatacagaggttatcgcgtttgccctgcaaaataaggggtatacggtcggcatctctcaacttggaaataaagatacaatcgcaccagctgtctcaaaaggaaatgaaacgttgttaaactggatcaataaggaaattcaatctctggaaggagaacagttcttccataaagattatgatgagacgctggtagctacttatggagaagagtacaaagaagaattggttgtagaaggtggaaagatagaatagtttttaaaatgatggcagaagccttacgcttctgccatcattttgtcgtctgcttttcaacaatatttccggaaaacatcgttctggaaggcggaatttctttctggaatacctgcatcatctgcgatacggcagtgacgcacatatattctaccctgttgtcgatggttgtgatctccggtgtgctgcaggaggcaagcacggaattgttatatccggtcacctgaaaatcttctggaatgcgcagatgtttttttaatgcatattttacagcgccggcagccagttcatcatctgcagccagtacacagtcgaaagatgtgccgtctgcatcgagttgttccaagatggaacatgctttgtgcaggttgccgggtgcggaaaacgcaatttttttggaaatgtccagtccgtgttccgaacaggaatccagaaagcccttgacctttttctgtccgctgtaattcaaagtacgatacagataaataggagaggttgctccgtttgaaaagatcaggtcggtcatatccttcagtgccatatagtcatcacagagaatggagtagatattttctccttttaactctccgtttaggatgaatacagggattttggaggcggcatccagaatatagcggttttcttccggggaattctcgataaaatgagaaccgatcagaagcactgcatccacgttacgggacaaaagcaggtgtaaataactctgcttttcctgcagttggtatccggtacagcagagcatagatgcataggagtttttgcgaagctcccgctccagataataaatggcctgcgcctgataaacatccgaggagtcggagcagagaatccctacagtgtgcatagagtttaagccgaggcttctggcaaatgcgttcggtgtatagctgttttcctccatgacagcaaggactttctttcgggttttgtcactgaccttgtcacttccgtttaaaacccgcgaaacagtggcgatggatactcccgctttctgggagatgtcgtatatattcataaaatgaattctcctttaaaaagattccaggaatatgcgggaatctacggcattttcgggcgtactgttttcaatcgttgcctgcaaaaaaggagcgcatgtacgctgccagtgtaagatttccgtgtaatcaagatttccggcacttcccggtgcgcacggcgtaagagtgccgttctcaatagtataatcttttgcgtggagtaatgcaatgtcagaactgtttctttccagcatttcgtgaaaaattactttctgatcggtgtgatttccttcccagagcatattgaccggatcgaagatcagttttaaatgcggggaagagataaaatccagtgccagccgggcgcgtttcgggttgtagataatatgtttccagactggttcaatggcgatcgtaacgctatagtgctgtgcataatcaactacagttttcagattttttaaaaagtaaacaagagcctcttcctcgtgtgcttcagggcagaaagaatatgttgtgttcggacatccggtctctgtaccgagaagtggtgagcccagccagtgagcaaaccgcatgttcgccttgtattcttcgatgatctcattaagctgtgtctgatccggattggcaagattgagatagcacccgtaaattgcaatatttaaattatttttctcacattcccggcggatatgcgcggcaagaccgggagttagcccgtggcggtcaatgccgtattctttgtaaataattttagaagccaggtgaatgcaggaaaagccctgctcctttgcaagagcaaggcggttttccagagaagttggttccatatcgtgaagccggattcccacttgaagattagacattcttaaaatcccccttccttaagctgcgttctgttcgcggagcagaacttctgtgtaggcgaggattaaaggggcaactccttttgcatcattttttacgattggttccctcatatagtactcaaatgttccttcgcgcatgtcaatatttccgagtcctgcaacgagacaaatattgtcgagctgcagaacaccgtctttttcagacagatggttcttgcagattccttcgaatgcgcggtatccgtatgagtagtaggaagcgtctaaaagaccgagtcggactcctttcatgatggcataagcgaagatggcagaaccagaagtttccagataatttggcttgattcctccaaggttgatcacctgataccacattccggtctcttcatcctgataaggaagcatggcatcgatcagttcgcagaacatctctttcaattcatcacgttgtgagttcatggattccggtatgatctcccaggtgtcggcaatggccattgcaaaccatccttcagcgcgaagccagaaattgttggaaagccctgttactttatcgcaccagaacatctctctggaagaatcatatgcgtggtagtacagtccgtttcgttcgcagcgcatgagttcgcggacattctggaactgccggaagctgtccatgcaggcatttccgttacaaaaagaaagttcatattgcatatagaacggctgagccatataaagaccatccagccagatctggtttggataaatttctttgtgccagaagtttccttcttttgtacgaggctgtccaaggagttgagaataaattgtatccatggcttttcggtatttttcttttccggtcaggtcgtacaggcggtacagtgtttttcctgcattgacattgtccagattgtattctttgggatcataatatttgatggatccgtcttcctgtacgaaataatcaatgaattcatcggcaaactgcagatagcgttcatcttttgtgatatcataaaaagtgatcagagctttgatcatgcagccgtcaatgtaattccaggtgttcggttttccggcgcggattttttcgatattccatgcaggttcctgcggtgtgctgttttcaatcaactgtttaatgtaattatctaaaattttcattttgaatacctccttaatgtaagtgctaacataggcttaaaataaagaaaaagcaggaaaataataattcgttattatgataacatatgatgtgaaaaaagtgtattgtgtatttttgataaatatattgaatgttattgtacaaaatagataattgacaattaaaaaacacaatgataacatacgtttgatagggaaaatgaaaatgtaaataggtgaaaatgaataatgtaagctgttacaatatattaaaaatgtacaaaggagatcaagatggaattaaaattgatttggaaacatgcacgggcagctgtgttggaatgctgtgaaggaagtatctatgagatggcgcagccttgtcagatttatctaaacggagagttttataaagaaacaaagcaggtagtgaatgttctgtatgacctggaacctgaaaaagagtattgtgttgcggttcaaaagggagaagaaaaatcagaaatcgtgttttgtacagaggctcaggattatacgctgaatgtgcgtgattttggcgcaaagggagatggcattcaggatgatacgacatatatccaggctgcgatcatggcatgtccgaagaacagtcgtgtgctgattcccgagggagtataccggatcacaagtctgtttttaaaagatcatcttacaatggaactggcaaaaggggcagtcctttcggcatgcacagagcgtgagaaatttccggttttaaaaggaacctgccaaaatgaaaataaagacaaagaatacattctcggaacatgggagggagatgcctgtgatatgttctccggaatcatcacgggaatcggagtgaaagatgtgacgatttacggagaaggcacgattgacggaaacgcttcctgggacaactggtggtttgaggcgaaaaagatccggattgctgcaagaccgcgtatgatttttctgaatcggtgtgaggatgtgagggttgtgggaattacggtacagaacagtccgagctggaatatccatccgtatttttccaaccgcctgcaatttatcaaagtaacggtattgggaccaaaagattctccaaacacagatggattgaatccggaatcttgcgacgatgtagaaatcacaggatgtctgttctctgtaggagatgactgcattgctgtgaagtccggaaagatttccgtgggagcaaagtacaaagtgccgtcttccaatttgaggattcgtcaatgttgtatgcgggacgggcatggctcaatcactctgggaagtgagatggcggcagggatcaggaatctgcaggcaagacagtgtgtgtttattaatacggatcgcggacttcggatcaaaacgagaagagggcgtgggaaagatgcgataattgatggtgttttgtttgaagatatcaaaatggattctgtgctgactccgtttgtgatcaattgtttctatttttgtgatccggatggacacagcgaatatgtacagtgtaaagaacctcttgcagtggatgagagaactccacagattaaagaactgtgttttagaaatattcaggcagaaaactgtcatgtggcagcagcatttttctatggactcccggaacagaaaattgagcgggtggaaatgaaacatgtgcaggtcagttatgcaaaagaagcggtcagtggacagccggcaatgctggacgggatcgatgagaatatctgcaaaatgggaatttttgcaaggaatataaagacacttgtgctggaagatattcaggttacgggacaggatggagaggcaattttaatggatggaattgattctctggaatggacaaaataaacaggactgtattatactgtacctatcaataagaaagaggactgtatgatgcagaaattagaattatatatccacattccgttttgcgtacagaaatgtgcctattgcgactttttgtctgcaccggcaaatgatgcagccaaagcggagtatgtggatgcattaaaaaaagaaatacaaagataccgcgaggttgcttcatcttaccaggtatcttctgtttttgtgggcggaggaactccgtccattttgtcgtgtgagcagatgggtgagatttttaaaatgctgagacaggtatttaccatcgacagggatgcggagattacaatcgaagcaaatccgggaactgtgacggaagaaaaactagaaggatggaaacaggcgggaatcaacaggatcagtttcggattacagtctgtcaacaatgaggaactgaaaatgctgggacgaatccatacgtatgaagaatttcgggaatcctatgacatggcacggcaggcaggatttgataatatcaacattgatctcatctcagccattcccggacagactgtaaaaagctgggagcacacccttcgtacggtggcagaattacatccggagcatatttctgcgtacagtctgatcattgaggaaggaacccgattttatcagtggtatggaaaaggacagacagatcaggagaaatatccgcctcttccggatgaagatgcagagcggcagatgtatgagcggacagagggaattctggaagaatatggatttcatcgctatgagatttccaattatgcacgggaaggaaaagagtgcagacacaatctggggtattggagcagagtagagtatttagggatcggtctgggagcctcgtcttttatttccaataccagataccatctttgtacagatatgatctcttatatagaaagaataggatcaggagaagatctgcgggaagaaatcgaagtgctgacaaaggaagatgccatggaagaatttatgtttctgggacttcgaaagatgcagggaatctcccgaatccagtttgagaattgttttggaaatacgatagaagaaatctacggagacgtgattgaaaaactggagcaggaaaaaatgttagaagtgaaagaggataaaatccggctgacaaaaagagggattgatgtcagcaattatgtgttctgcgaatttctgctgtaggaaaagattttgaagcttttaataattcagaaacaaatatcaaacattggataaacaaaagagtgctattctcataccatcaaacaaagaaaggcaggtatgagaatatgaaagaaaagaacaaggcaggcagagtgtccaaaaagacgatagctacagtattgattgcaatgattggtacagttggaatcgggatgtgcatgagtattgcatggagttatgcagcaccagagattgcaaaggagttgtggatttactttgtctcatttaatttatcaaatctttaaaataaaagagtcagaaacaggtgcgtcagaagaaaaaattgaccgcaccttgttttttgtttacaatttgtacataattcaaaaacaaaacgaaaacaaaaatgtgttaggatcgtcctgtattttagggaaatgggaagagatacaaaaggagaagataaaaatgattcgtatacttgtagtggaagatgatgaaaaattaaatcagattgtatgtacctatctgaatgacagcggttttcaggcgaaggggtgtctgtcggcagctgcggcatatgaggaaatgtatcatacggtgtaccagctgattatttctgatattatgatgccggagattgacgggtttgagtttgccgggacagttcgccggataaatgagacgattccgatcctgtttatgtcggcaaaagatgatctgccgtccaagcggaaagggtttcagctcgggattgacgactatatggtaaaaccgatagaactggatgaactgcttcttcgtgtaagggcattgcttcgcagggcaaatatagagatggaaagaaaaattacggtgggaaatctgatactggatgcggatgctatgagtgcagaaattgacggagaagagatcagtcttactacaagagagtttaatattatttacaagcttttgtcttatccgaaaaaaacgttttccagagcgcagctcatggacgagttctggggtgtggagacagataccagtctgagggctgtggatgtttatgttacaaaactcagagataaactgtcagcctgtgacggatttaagattgtgacagtccgcgggcttggatacaaggtggtgctgcaatgaaagaacgagaggaacaaaggggaaaagtaaagcaaagtttatttccggtttctttatttggaatctatattggggttctgtttctgatgtcggggatacataccggactgatcgtgtttatgaattcggcaggctggaataaagcggtgatgaccgtggtgccgatgtgttactggggaatggttgccatgggactgacgctgtttaccagatggaaggtaaaaagaacctacgaagaaccactgtataaaatggcagaggctaccagaaaagtggcgaacggagatttttccgtctatgtacctacatttcatacaatggagaaacgggattatctggatgtcatgattctggattttaataagatggtggaagaactagggagcattgaaacgctgaaaacagattttgtgtcaaatgtttctcatgagatgaaaacaccgctttctattattaaaaattgtgcggaacttttgcagagggatgcgttgtcggaggaacagcgcagagaatatggggaagccattgaaaatacagcaacgcgcctgtctgatctgatcagcaatattttaaagctgaataagctggaaaaccagaaaatacagccggaggcagaagtgtatgatgtgtgcagacagttatgtgactgcattctgcaatatgaatctgcctgggagaaaaaagagatcgagatggaagtagaaatggaggatcgggcagaaatttatgcggatcaggatctgatggaactggtgtggaataatctgctgtctaatgcggtcaagtttaccgagctgggcggtgtgatcacggttcgtcagttgtcggatgagcagggggtgacaatctctgtatcggataccggctgcggtatgagcaaaaataccatgaaacatatatttgataaattttatcagggagatacgtctcattccaaagagggaaacggactggggatggcaatggtaaaacaggtgctggagcttatggatggggagattcaggtcctaagtgaagaaaaacagggcagtacgtttattgtgacactgcccatggcgggaaaggagtttggtcagttatgaaaaagacagaaaagccacagagaaattttgtggcatatgaatataaagaagtgagtgcaaacagcagtcaggcctcctttttgttagatggatatgagaattttgggtgggaaccggatgacaatctgccgcagagcagccagagtcgtcatccgggggcggagaagatgatgactctgcgattgaaacgtgatcggaaaattgtaaataaaacggagcttacaaggctgcagcgaaactttgaagcctgtgtccgggaaattcagtcgctggaaaacagtaagacatcgaaagcgacaatatgggcgctggcagcaggagtgatcggaactgcttttattgcatgttctacgtttgcggtgacagcagttccgccgaaaatccttttgtgtattatttttgcgattcccggatttctgggatggatcctgccgtatttcctttataagaaaattgtgagaaaccagacggaaaaactgacgccgatgatcgaagcgaagtatgatgagatttatgagatttgcgaaaaaggaaataagctgttgtattagaagtgaaaaaagtacagggttataaattggaaacaaggggaaatataaaaagtataaagaatatataaacatggttgacaaatacagaccatggtgctatcttaatatacggaaggtgttagcactcaaaacaaaggagtgctaacaagaaaaacctcaggtgagagaaaggaaggtctgatgggattgaatacagaacttggcgagcgtaagctcacgattttaaaagcgattatccaaaactatctggagaccggagagcctgttggttcccgaacactttccaaatacacggatttgaatttgagttctgcgacgatacgcaacgagatggctgatctggaggatctgggatacattttccagccgcacacttcggcaggaaggattccttccgacaaaggctaccgcttgtatgtggatatgctgatggaggaaaaggagcacgagatcacagagctgcgcaacacgatgcttgaaaaatccgataaagtggatcaggtgctgaagcaggctgcgaaagtgcttgctgtgaataccaattatgcaacgatggtttccgctcctgtgaacagccggaacacattgaagttcattcagctttcacaggtggatcaggaacagatcgtggcagtgatcgtgatgaatggaaacgtgatcaagaacaagatcatacaggttggtgaggtgcttgccggtgagacgcttctgaagctgaatatgcttttgaatacaacactcaacggcatgtcgatcgaacagatcaatcttggtctgatcgcacgattgaaggagcaggcaggaattcacagccgggtgatcagtgatgtgctggatgccgtggcggagattattcatgtagatgatgatatggagatctacacgagtggtgcgacgaacattttcaaatatccggagctgagcgataagcagagtgctcaggagattatcagtgcatttgaagagaagcagcagctggcggatctggtgacagagacactggcaagtgaagaaaatcacgggattcaggtctacatcggggatgagaccccggtcaagacaatgaaagactgcagcgttgtaacagcaacctacgaattgggagaaggcatgaaaggtacgatcggtatcatcggtcccaagcgtatggattacgaacatgtcatgaagacgctgaaaactctgcagagcgagttggacgcaatttattataaagacccgaaagaataggaaggtgattgctggtggcagagaatatgagtaaagaagagatggtcaaagaagctgtggaagaagcgaaagcaaaagcagcaaaggaaaccggggaacaggaagaacaggcagaagaaactgtggaggaaacagcagagcaggaagaagtttccgaggaagccgaagaagcatcagaagaggaagagacagaagaaggttccggtttcatgaagaaatttggtcgtaagaacaaaaaagataaaaaagacgagaagattgaggaactgactgacagactcactcgtcagatggcagagtttgataacttccgcaagcgtacagacaaagaaaaatctcagatgtacgaaatcggtgcgaaagatatcatagaaaagattcttccggttgtggataacttcgaaagaggaatcgcagctgtaccggaggaagaaaagtccaacccgtttgcagaaggaatggagaagatttacaaacagctgatgactacactcgaagagattggcgtaaaaccgattgaagcggttggccaggaatttgatccggattttcacaatgcagtgatgcatgtagaagatgaagaagttggagagaatatcattacagaagaattccagaagggatatctgtacagagacagtgtagtaagacatagtatggtaaaagtggcaaactaataaggaggaaataatcatgggaaaaatcattggtattgatttaggaacaacaaacagctgtgtagctgttatggaaggtggacagccaacagttatcgccaacacagaaggagcaagaacaacaccatctgtagttgcatttacaaaaacaggagaacgtctggtaggagagcctgcaaaacgtcaggcagttaccaatgcagacaagacaatctcttctatcaaaagagagatgggtacagattataaagtagcgatcgatgataaaaaatattctccacaggagatttctgcaatgatccttcagaaactgaaagcagacgcagaaggatatcttggagagaaggtaacagaagcagttattacagtgccggcttatttcaacgatgcacagcgtcaggcaacaaaggatgcaggtaagatcgcaggtctggacgtaaaacgtatcatcaacgagccaacagcagcagcacttgcttatggacttgacaacgaaaaagagcagaagattatggtatatgaccttggtggtggtacattcgacgtttccatcattgagatcggagacggagttatcgaagtattatctacagcaggtaacaacagacttggtggagatgactttgaccagaagatcacagactatatgctggctgatttcaaggcaaaagaaggagtagacttgtcaacagacaagatggctcttcagagactgaaagaagcagcagagaaagcgaaaaaagaactttcttctgcaacaacaacaaacatcaaccttccgttcatcacagcaacagctgaaggaccgaagcattttgatatgaacctgacaagagcaaaatttgacgagctgacacatgatcttgttgaaaaaacagcagagccagtaacacgtgcgctttctgatgcaggaatcacagcagcagaattaggtcaggtacttcttgtaggtggttctacacgtattccggcagtacaggaagaagtaaaacgcctcacaggaaaagagcctagcaaatcattgaacccggatgaatgtgttgctttaggagcatctgttcagggtggtaaacttgcaggagatgcaggtgcaggagatatccttcttctggacgtaactccactgtcactgtctatcgagacaatgggaggagttgctacaagactgatcgagagaaatacaacaattcctacaaagaagagccagatcttctctacagcagcagataatcagacagcagttgatatcaacgttgtacagggagaaagacagttcgcaagagacaacaagtctctcggacagttcagactggatggaattcctccggctccacgtggaatcccgcagatcgaggttacattcgatatcgacgcaaatggtatcgtaaatgtatctgcaaaagatctgggaacaggaaaagaacagcatattacaattacagcaggatctaatatgtccgatgcagatatcgacaaagcagtcaaagaagctgctgaattcgaagcacaggataagaagagaaaagaagcgatcgatacaagaaacgaagctgatgcgatggtattccagacagaaaaagcactcaaagaagtgggagacaaactggatgcagcagataaatcttctgtagaagctgatgtacaggcgctcaaggatatccttgcaaaatctacaccggaagatacatccgatgcacaggttgctgaaatcaaagcagcaaaagacaaactgatggaaagtgcacagaaactgtttacaaagatgtatgagcaggctggtgcagcagcaggcgctgcaggcggaccgacaccggaagcaggtccggctccggaaggattccagggagatgacgtagtagacggagattacaaagaagtttaagagaccaatctgacgggagagagcactctttttccggagtctggaaggcatgtctttcaggctccggcggtgtgccctcgcctgtttggttatgagttggatcaaggatgaaaggtagattattatggcggagtcaaaaagagattattacgaggtgcttggtgtaagcaaggatgctgacgatgctgcgatcaaaaaggcgtatcgtgcactggcgaaaaagtaccatccggatatgaatccgggcgatgccgaagcagaaaagaaattcaaagaagcatccgaagcctatgcggtactgagtgatgctgaaaaacgtcgtcagtacgaccagttcggtcatgctgcgtttgaaggcggcgcaggcggtgctggcggatttggaggctttgacttcaacggcgcagattttggagatattttcggagacattttcggggatctgtttggtggcggcggaagaagaggcggccgtgcgaacaatggcccaatgaaaggcgcgaatatccgaaagagcatccgtattacatttgaggaagctgtgtttggctgcaagaaagaactggaagtgattttaaaagatccatgtacgacatgtggaggaacaggtgcaaaaccggggacttctccggagacgtgtccaaagtgtggaggaaaaggtcaggttgtctatacgagccagtcctttttcggaacggtacagaatgtccagacctgcccgaactgtggtggttccggtaaggtgatcaaggaaaaatgtacatcttgctccggaacaggatacacttcaagtaagaagaagattgaagtgaccattcctgcaggaattgacaacggacagagtgtacgtattcgcgaaaaaggagagccgggtacaaacggaggtccgagaggagatcttctggtcgaggtgaacgtatccagacatccgatcttccaacgtcaggatatgcacattttctcaacagtgccgatttcatttgcgcaggcagcgctcggtggagatgtgaagatccagactgtggacggagcggtaatctacaatgttaagccaggtacaaagactgatacaaaggtacgattaaaaggcaagggagttccgtctctgagaaattccgcagtgcgtggagatcactatgtgacactggtgattcagacgccggaaaaactcagtgcagaggcaaaagaggcactgcgcagatttgatgaactgagtggaaactcactgcatcaaaatgacagtaatccggaaaaaagcgagaaaaaaaccaaaagaaaaggtttcatggataaagtaaaagaagcctttgaaggggaagaataaaattcagaatgaagccaggcggagacagtctcatagagaggctgtctctgcttgttttatgcctgtaaatacgataacagatcgctctcccagcaaaacagtctatcctgcagtcggcatatcgttccccgaaaatgtctgatgcagcaagtctccggtattgactgcaatcttccagacataaccgtttggaagggatgggagcacaagttgttttgcaatccagtgtgcgttgactgcaagaaatacaagatcttcctgtccggtcttttcatcaaatcctgcgaacatcacacaggcagtgtgagaatctgaggaaggaacaggcggctctggggtgagtccgtgaccgctcatggaaggatatgaggtgtagctcggctccagatctctgcggatggccgggtgctgtttacgaaatgcgatcatatattgaaagaacgcaaacagagcctgatttttggacagcagactccagtccagccaggagatttcgttatcctgacagtatggattgttgttgccaaatcgcgtatctgcaaattcatctctggataaaaacattggtgtaccacggctgcacatcagcagtgcacaggcattttgcatcattttcagccgcaggcggaggatttcgggattggaagtttctccttcttctccgcagttccagctgtggttgtcatcacagccgtcggtattgttccagccgtttgcctcgttatgcttctgattatagctgtatagatcgcacagtgtaaatccgtcgtgacaggttagaaaattgacggaagcatttcccccgcggtactgcggattgtataaatccggggaacccaagatccgtttcagagcagtctcatgaagcccgtcatccccttttagaaaacgccgcatgtcatcccggtagcgtccgttccattcggcccagcgtctccaggacggaaaggagccaacctgatagagtccgcccgcatcccatgcttcggcaatgagctttacatttccaaggatcggatcaaaggcaaggctctgcagaaggggaggctgactcatcggagagccgtcttcatttcttccgagaatggaagccagatcaaaacggaaaccgtctacccggtagtcagtgacccaatagcgcagacagtctaagatcaactcccttacaaccggatggttgcagtttaaggtatttccacatccgctgaaattgtagtagtatccgtccggtgtcagcatgtagtaaatgttgttgtcaaagcctttgaatgaaaagcacgggccgagttcgtttccttctgcggtgtgattgaacaccacatccaggatgacatcgatttcgttggcatgcagtgacataaaaaccagctcctttataaaataatctctttgtttattataatataaagacagaacatgaaaaagagtaaaaatccggttggaaaggatttttactctttgacttgttactgcagactattttttaaacagacggtttaaaaatagtctagcgggtgaaaaatttgcgttctctggtttccggctgggttctctcaactggagtttcgacggaaggttcatcggagcagtcgcaaggtgtttcggaagcctcgccgcactggacggaagcctctccggtttcaataacggcaccaaaagcaatcgggatctggatgcagagactctgggttacagtaaacgtgcaggaggttttgctgcccggacactgtggaccggtgtggatgacaggatcgccgcagcagattgttctggcggttccgggatgtgcaaacggggagaccgttacaggaacgcaaacggtttctttctggtaaaacgtagattcacaggattctgtggaaccgcatgaaggtccgcatatggtcaggccggaagttgtctgaccgccgccgaaaagacagagattgactgggccgaccgcataaggtctgacaagagaaaagcagacctgcatctcaccatccactttatccagtgggaaatcgaatttcagtcccgtacatccggttggcggatccggatgttggattgttttgagttctacattttcacctcagattacgttctgggggtttccgtcgattacgaccgtaacatccaggatatcttcctgcgtgatcgcgctgcagatatcaagcaggaaatggcttaagtctgcatagagaggtgtgtctgttccaacacctgcaatatcatagcaaaatcgttggtattatcccggttttggggttaaaacggaagtctccgtattgagcaaaaaaacgaacggcaaaatccgctcgccgataacagtagaatagtctgtttcataattacatgatgtcataagaaataccttttgaaaaattttattctgtatagtatatgataaatctcaaaacatgttataattgccatgtgtttttcaaattttggcaaaggggatggaaaaacaagaaaaaggaatttatgggagagaaaagatgtttatgagaaaaaaggaaaatgagctgcagattgactggaagcatttttatctgagtgtactggcgctggtcattccgatggcgcttcagaatctgatcaatgtgggtgtaacggctgcggatgtggtgatgctggggcgcgtaggagagacagcgctgtccggatcttctcttgcagggcaggtgcagtatattatgacgttgtttttgttcgggctgacatccggagcaacggttctgaccgcacagtactgggggaaaaaggatctgcggacaattgagaagattttgggtcttggaatgcgggctgcggtttttgtgactgcattattctttctggcagcgcagatcatgccagagcagcttttgcggatatttacaagtgaaccagaggtgatcaaagagggcgtgaagtatttgcggattgttagtttttcttacatttttatggggatcacacagacttatctttatattatgcgaagtgtggaacgggtcgttgtggcaacggtggtatatttgtgttccctgctctgcaacattacgatcaatgccattttgatcttcgggcttctcggaatgcccgccatgggcgtgcagggtgcggcaattggaacgctggtttccaggctcctggagatggtactggtatgtgtgtactcgaaagtgtggaacaaagatatcaagttcaggatcgcctacttttttaaaacagagcacgttttaaatatggattttctgaaatacgcattcccggtgatcttaaacgaggtgctctggggacttggaactgcgacaaatacggcagtgcttggtcatatgggaagtgctgcagttgcggcgaattcggtcgcacaggtggccagacagctcgcaacggtggtagcattcggactttccagtgcgacagcgatctatctgggcaaaaccattggagagaaaaagtatgagcatgcaaaagcatatgcaaagaggttcgtatggctcagtgtgattatgggagttgtgggaggtgtgctgatccttctgatctcaccggttatggcagagacgatgactctgtctgaaacagcaaaggggtatatgcggttcatgttctttgtaatgtcctattttgtggtagggcaggcgttcaacacaacgatggtcgtgggaaccttccgttccggcggagatacccggtttggcctgctgctggatatgtctaccatgtggggatgttccattttatttggtgcgctcgcagcgtttgtgttccactgcagtgttccggtggtgtatatgatcctgatgagtgatgagatcattaagattccgatcacctggcgccggtacaagagctataaatggctgaaggatgtaacaagagaagaattgtaggggaagctcctttctaaaaaaatcttgcaaaatgatctgcaatcttataaaatgcagaagtgacttttgtaaagaattatttttaggaaggagtttttttgcatggcagacatcaaaataaagaaagatcactgtccgctgatcctgacacacagtctgatcggagggaaatggaagctgaagatcttgtggcatattctgcagggggataatcgattttcggagttaaaaaaggaaatcccgggtatttcggaaaaagtgttatattcgaatttgaaagaactggaggatgcaaggcttttatacagggaagtgatcaaggaaaagaagccgtccgtgattcgttaccgtctttcagaagaaggcgtggaggtcagggcactgatcgatgcggcacaccggtttgccaatcggtatgcaaaaaagcatatacatactaaaaagtaaggtattgcgaaatgtgagtgaattgtgtatagtctttttgtcagtagacaagacatatttttttacacatatgttagctaaaactaacaaaagtaaataaaaactaatggaggtggtggtatcaaaaaatatgtatcgacaatcatattggcggcggtgttgttcgtagtttctgtctgctctctgtttatcggggtaatggatgcggatctggcgtcgctgatgcagggagatccggaagtgatcaggttgtttctgatttcaaggattccgcggcttctggcaattctgtgtacaggaatcggaatgagtacagcagggctgatcatgcagcagctttgtatgaataagtttgtgtctccgactacgggagcaacgatttcttcggcccagcttggaattttgctggctctggtatttctcccggagtctacacttcttggaagagcagtgtttgcgtttgtggcggcgattctgggaacctggatttttgtgtggtttgttcagaaaatccgttttaaagatgtggtgctggtaccgttggtcggaatcatgtttggaaatgtgatcggagggatcaccagcttcattgcctatcaatacgagatgaatcaggcgctgtccacctggctggtagggcatttttctatggtactgcgcgggagatatgagattgtgtatctgacagtaccgctggttgtgctggcatttgtatttgcaaaccatttcaatattgtggggatcggaaaagaattctctcagaatctgggagtgccttataatctggtgctttttatgggccttacgattgcggcaatgattacggcgtcggtggtggtagtggttggttcgatttcttatatcggtctgatcgttccgaatattgtcaccatgtttaagggtgataagattcgcggaacgctggcagacactgcgctgtttggagctttgttcgttcttgtatgcgacatgatctcaagagtagtgatcgctccttacgaactgcctatcgaactgatcgtaggaattctcggcagcatcctgtttgtaggactgttgctgtatcgactgaaaaacggaggaagaagaatacttctggggaaaggaggcagacaggatgcacagtgcagttcataagacaaacagcagaaagcttcttgttttagggatactggtggcggcagcagcaatcgcctatctgtttgtggatgtttccttttcaaatgagcgtctgtttcggtatgctatgaaaatccggattccaaagctgatggtcatgctggtggcatctgctgccatcggaggggcaacgatcgtatttcagaccattattcacaatacgattgtgacaccatgtctgttgggaatgaattcgttgtatacgctgattcacacagcagtggtattctttgcaggttccggaagttttctcgctgtcaatgcgaacgtgtcttttgtggtcgatctgtttttaatgagtacaacagctgttttggtctacagctatctgttcaaaaaaacaaactataatgtgttgtatgtattgttgatcggaacggttttgacttcgtttttcggaagcattcagagtacgcttacaagaatcatggatcccaatgaatatgacagccttctggcaacgctggtagcaagctttaacaacgtcaactcggaaattattctggcagcagtcctggttctggcaggtatcgtgtttgtgttgcgaaaagaacttgcgcttttggacgtgttgtctcttggaagacatcaggcaatcaatctgggtgtggattatgaccgggccatccggaaacttctgcttggagtgacactctgtatcgcgaccgccacagcgatggtaggaccgatttcattcctcggactgatcatcgcaaatctgtccagacagtttttgaaaacataccggcattcgcagctgatcatgggatctgtcttcttcgggatgtttgttctggcggcagggcagatgatctcggaacagatctttgtatatgcgattccggtcagtgtatttattacagtaggcggaggaggatactttttgtatcttctgttgaggaaaaggaggagttagaagagtgaagatacgtggagtaaaaaaacagtatcacggaaaaaccgtggtggattccgtttcttttgaaattcaaaaaggaaaagtaactgctctgatcggtcccaatggagcgggaaaatctactgtgatgagcattctttccagactgatcgcaaaggatgaaggagtggtagagtttgaaggaaagaagctggagcactggaagagtaaagaattgtcaaagcatctggcgattctgacacagagtaatcatatcgagatgaagctgacagtcagagagctggttgcattcggacggttcccgcattcgggagggcggatgaccaagcaggataaagaaatcgttgcacaggcgatcgattatatggaactaaaagagtttgaagaccggtttctggatgaattgtccggaggacagcggcagagagcatacatcgccatggtcattgcgcaggatacggagtatgtctttttggatgaaccgacgaataatctggatatttatcatgcttcgaatttgatgaagatggtgcggaagttaagtgacgagctgggaaaaacagtgatccttgtacttcatgagattaattatgcagccttttattcagattatatctgtgcatttaaaaacggaaaaatcgcgaaatatggaaccgttgaagaagtcattcaaaaagaagtcctttctgagatttaccaggtggattttgaaattttaaatatcaaaggaaaaccattatcggtatattattgatgacagaaaatggaagaaaacaaagatggaggaagaagatgagaaaattagcaaaagtattattggcaggagtggcagcactcagtctgacagcatgcgggcaggcagaaggaacaacaggaagttctgcggatacaacggcaaaggagcagaaacaacaggaaacacctgagaagatcaagatccagtctctgaatgcaaacggagaagaaatttctctggaagtaccatatgatccggaacgtatcgctgttttggatatggcagcactggatatcctggataatcttggtgttggagacaaaatagtaggttctgcatctacttctctggagtacctttctgattatgtggataatgaaaaggttgcaaatctgggaacgatcaaagaggcagatctggaggctgtgatggagtgtgagccggaagtgattttcatcggcggacgtctggcttcttcctatgacgcgctcagtgaaattgcaccggttgtatacctttcgacagatgtggagacaggtgtcgtaaaaagcgtgacaaaaaatgcagagacgattgcttctatgtttgggctggaagatgaagtaaaagaaaagacagccggttttgatgaaagaattgaagcattggcagaaaaagcaaaagggcatacagcactggtaggaatgactacaagcggaagctttaacttaatgggaaatgacggaagatgctccattatcggagtggagatcggatttgacaatctgacagctgctgaaagtacctcaacacatggaaatgaagcttcatttgaaacagttgtcgagaaaaacccagagtatattttcgtgatggatcgtgatcaggcaatcggggcagacggggcacagacggcaaaagaaattatggaaaatgaacttgttatgcagacagatgcttacaaaaatggaaaaatcatctatctggaacatccggcagtatggtacactgcggaaggcggaatcactgcactggatgtgatgctttctgatctggaggagtccctgtaaaaagttgttgtgtgcattatcctcaaattgtggtacaatagaatcagtctgaaatcctgttttcaaagatggagacagatgaatttatagaacaaagagaggtaatgaaaatggaagaacaatatacagaaggatgttccgaagagtcctgtgcaggatgttctcattccggttcctgtgaaagccagaagcagaatgcaggcaatacggcgccatccaaagcaccggcaaatgtaggttcccaggtgaaaaaagtgatcggagtcatcagcggaaagggtggcgttggaaaatcgctggtaacagcttccctggcacgtatgatgatcgaaaaaggatatacggcaggaattttggatgcagatattacaggtccatccattccgaagatgtacggagtgcacgagatggcaatcggaaacgagatgggaatgcttccgtgcagcgcaccggatggaacaaggatcatgtccgtcaacctgcttttggaagaggaggacacaccggtcatctggagaggttctgtgatcgcaggcgttgtgacacagttctggtcagatgtgatgtggggagatttggattatctgttcgttgacatgcctcccggaacgggagatgttccgttgactgtatttcagtccctgcctgtggatggagttgtgatcgtcacctctccgcaggatctggtacagctgatcgtaaagaaggcgtacaacatggcaaaacagatgaacattccggttcttggaatcgtggaaaactacagttacatcaaatgtccggactgcggaaaagagatcaaagtgttcggtgagagtcatattgacgagattgcaaaagaactgggagtaccggtacttggcaagatgccgatcgacactgcgattgcagaagcagtagaagcagaaaaattttatgaagtgacgaacccgtatttgaaagagatcgatttgtagggggctgggaaagaaaagaaggcttgtgctggaaatgtgcggaaatatgccgtcgtctcaaagtgctgaatctttgaggcggcggctttttatcacagatttttataactgaatatttttgaacagatctccaaggcttgtaccgatctcttcggcttttggaatctcaactttttctacaacttcttcttccggttcttccaaagctttcatgctcaggctgatcttgccgtctttaataccgatgactttgacctgaacttcatctcctacattcaaaacagctgcaggattcttgacgcgtttttgagaaatctgagaaacatgtaccagtccggaaagaccgttttccagtttgacaaatgcaccgtagttctgtaatgtctctacagtaccggacataaccgtaccgattgggatacttgcgatctgtgcttctttttcttttctttctttttctttgagaagctcacgggcggacagtacaagccggttgcctgcctgatctacatcgatcacttgaacttccacatctttgagcaggtaagtctccagatcttcaatgtaagaaagggagagtttggatgccggaataaatccgcgcagtccttctaccatggcaatggcaccgccatttacgattccttcgatcttaacagggaggatcgttttcttttccatatattccaaaaccctgttccatggattggcatcgtcaaaataatcttcgtaatcagccattgtctctgtgtgtccttcgtttgtcagtaattcttctgttcttaattcttcgctcatcgctgcacctcgactttctaaaactttaaaacaaaaatctcttaaaacagaagatttttgctttgcattaaagacagtatagcatatgttttatcaaaaagacacggaatcttgaaatttgggttgacgaaatctggaaaaaatggcaagctacatataggttactgttcacaccaataaccactatagaagaaaataagcaaaggaagtttggattgatatgaataacggagtgagtaataataaagtgtatgtagtagggcataaaaatccagatacagattcgatttgttctgcgatcgcctatgctaatttgaaatctaagatcacgggagaagattatagtccaaggcgagcgggacagctcaatgaagagacgcagtatgtgctggatcattttcaggttgaggcaccgaagctgttgtcggacttaagagtgcaggtcaaagatgtagaactgcgtaacattgaaggaatcaagggaagtgtttccatcaagagtgcgtggaaatctatgaaagagctgaatatcaagacgcttcctgtgacaagggacagcaaactggaaggtctgatcaccattggagatatcgcgacttcttacatggatgtgtatgacagcgggattctctccaaagcaaggacacagtaccggaatattgcatcgaccattgatggaaccatcattgcaggaaatccacacagctatgtgttgaacggaaaagtcgggattcttgcatcaagccgaaagctgatgtcggaatttgtggaagaaaatgatctggtgatcttaggagaccgccaggaggcacagcagcatgccgtcgatttgaatgtgagttgtatggtggtatgtaacggagcacgtgtaggagaagagattttaaaacaggcagaagaaaaagaaatcgtgatcatttcttctccgcatgatgcattcacggtcgcacgtttgatcaaccagagtattccggtgaagcagtttatgacaagagaggggatcgtttctttccagatggatgactatgtggatgatgtcaaagatgtgatggcacgcaggagattccgtgacttcccaatcctggatgaggcaggcaatttcctgggatttatttccagaagaagattgctcaacagccgcagaaaacaggtgatcctggtggatcacaatgaaaaaaatcaggcagtggacggtgtggaagaagcagaggttctggaaatcatagatcaccaccgtctgagcagtattgaaacgatgggtccggtatttttccgaaatcagccggttggatgtaccgctacgatcgtttaccagatgtatcaggaagagggagtagaagtagagccggtgatcgcatcactcctttgctcggcgatcatttccgataccctgatgtttcggtctccgacttgtacaccgttggatgaaagatctgcgaggaaactggcagagatcgcagggattgatattgagaagctggcactggagatgtttaatgcaggaagtaatctgaaaggaaaaacagcagaagaaatctgtttcctggatttcaaacagtttacagtcaacgatatcaactttggagttggtcagatcagctctatgagcgcagaagagctgcgtgagatcaaaacagaagtatccgcttatctggaacaggcaagaaagacacaggggctggatatgatcttctttatgctgaccaatattgtcgcagaatcttcagaacttttatgcgccggaaacggagcaagagaaaagatgatctctgcgtttgatctgaaaggaaatccggagatgatcgagctaaagggtgtggtgtccagaaagaaacagcttgtaccgacactggtttcggcactgcagcagtagaaggagcaaaaaatgggaaaacaagtatggaaagccgggaatatggtatatccactcccggcagtgatggtgagtacggcggacaagtccggaaagagcaatattctgacgatcgcatggacgggcacgatttgtactaatccggcgatggtttatatttctgtccgtccggagcgatattcgtatcatatgttaaaagagagtggagaatttgttatcaatctgacaacggagcagcttgcaaaagcaaccgattattgcggagtacgttccggaaaggatgtggacaaatggaaagaggcacatctgacaccggcaaaagcagaaaagcttcagtatgcaccggtgatcgaagagtgtccggtcaatatcgaatgtaaagttacagaagtgaaaaaactgggaagccaccatatgtttctggcggaagttctggcagtacagattgatgagcagtatttgaatgaaaagaataagtttgagctgaataagacaggactgatggcatattcgcatggagagtatctgtctctcgggaagaagatcgggacatttgggtacagtgtgaaaaagaaaaagacgaaacataagaaaaagaaaaaataagaaaaagaacatccccgtggaagcaaagtatgaaaacttttgagttctgcggagatgttctttttagtcactgtttcccgaaatctattttataaagtctcaacaaatctgtcaaatgcagcgagtccttcgtctgtgcatttgtaaacaccggcatcttccaggacctgacagaagacctttccgacttcctgttccagaatatgcgtgacattttctgcgttgatctccggataggacggcaggaaactttcggtccagtccgcgtgctttgcaatggtctcattgcttctgatgtcttttttctcaagaatataagtctttaacagctccagctcatctttgagacgtgcagggagtacagcaagccccatgacttcgatcagaccgatattttcttttttgatatgatgcagttctttgtgaggatggtatactccgagcggatgttcctctgtggtaatgttgtttctcaaagtcagatccagctcatattttccatcccgcattctggcgatcggcgtgatcgtattgtgaggctgtccgtctgtttcagcaaaaatgaaagcagcttcatctgtatatcctcgccatgcctgcagaatgtggtctgcaaggtcgatcactctggtcacatcctcagactgcagacggatcacagagagcggccattttacgatgcctgctgtgacatcttcaaagcccttgacagtaaactcctggatgacaggcgctttttccatggcaaaggtataatgtccgccctggaagtggtcatggcttaaaatagaaccgcctacgatcggaagatctgcattggatccgaggaaatagtgcgggaactgtttgataaaatcaaacagcttgacaaaggtctggcgctcgatcttcatcggagtatgttctccgttgaacacgatacagtgctcattgtagtagacataaggagaatactggaatccccgcttgctgtcattgaccgtgatcggaatgatgcggtgattctctctggccgggtgatcgaggcgccctgcatacccttcgttctccatacagagctgacatttcgggtaagccgaaacagaagcattgcgcgcagcggcaatggctttcggatctttttccggtttggacagattgatggtaatatccagtgttccgtagtctgtgtctacagtccatctgcggtcttttttgatccggtaccggcggatgtaatcgctgtcctgactgaacttgtaataaaactgagtggcggattccggagattcctgataatgtctccagaagtcgttctgaacctgagccggacgcggcagcaggcagttcatcagtctggtgtcgaacagatcacgataaccgatgctgtcttcaatgatgccgcgtgtaacagcctccttaaggagatcggcgaggatgtcttccagcacaagatctgtcagatcacaggagacatctttccagttgtcttcatggaatacatccaaaagtaagtttgtagtgtaaatacgttcgcattccggagtcagtccggtatcaatcccgtactgtaccagttttttgatagattcatataacatggataaattccttctttcttagagagtctccagtttctgtgcaccgcttccgatatcaacggtgtagaattcggcttcgtgtccgaccttttctttatatgcaggtccgatagtattgatgaaagtatcgacagtgtcattttttacgatacttacggtacatccgccgaatccgccgcctgtgatacgggaacctacaacacccggaatctgccatgcaagatcgaccaggatatcgatttcttcacaggatactgcgtaatcatctcttaaagagatgtgggactgattcatcagttcgccgaaacgctcgatgttgcctgcttttaatgcagatactgcttcgatggtacgctggttttcataaactgcgtgtttcgcacgtttctgctctacaggatccgtgatcacttctttgaatttttcaaaggtatcgatgtccagatcaccaagagcgttgatatccagttcttcctgaagaagagagagcgcatggctgcattcctgacgtctctggttgtactgagagtcaacaagactgtgttttaccttactgtttgtgatgatgatcttggcgtcttccagttctaccggtgcatactcataggagagtgtgccggtatccaaaaagatcgcgcagtcttttttgcccatggcaactgcaaactgatccatgattccgcagttgcatccgttgaagttgttctcagagtactgtccgatcagtgcgatgtctgtcatgcttaaggcatcaaatccacagagatcttttgcgattactccggtcagaacttccagggatgcggaagaggacaaaccggaaccgttcggaatatttccgtagatcacaagatccattccacagtctacagagtatcctttttcttttaatgcccagagaactccaagcggatagtttgcccagttgtattccggcttgttggtcagatcgtcaagagtggcagtgatcacaccgagatgatccagattcatagaatagagacgcaagatacggtcactgcgctttttggcgattccgtatgtaccaagtgtcagcgcacatggaaatacgtgtcctccattgtaatctgtgtgttctccgatcagattcacgcgtcccggagagaaataaaaaccggcatcttctgtgctgccgaaaagttcttcaaattttttcatcaaacgttctttcatgatgttgattcctcactttccatagagactgagtatttttacaagtttattataaaaatcagactgaaaaaagtctataaaaaatacgtgcatatatatggaattatgttgtataatagaggtgaagaacagatttggggaaaggaaagaagagcgtggaacagacatacaaatactcctataaagtaggagataatcttctgagttctctttccgtttataatgtggggtatcagcagtgcggaccggagcagcagtggggaccgggaatccgggatcattattgtatccaccatattatttcgggaaagggaacctatgtggcagataaaaaaatatatcatctgggagagggagacagttttattctgtatccggatacagaggtcaagtattatgcagatccggatgatccgtgggaatacgcatgggcggggtttatgggaaccgatgcggctgtgatggtgcgggcaactgattttgcgagaaaacggccggtgatcggaagggataagattccgggagatttgatctggcggcagctggagcagatctatcaggtaagaggaacgacatatgaagcggcagcagctatgacaggagctctttataccatgctgtccgtgtttattcactatgcggaaaaagaagagaaaaaagatgacctccggcaggtttatgtggagcgtgcaaaggattatattgcatccagttactcctatccgatcacagtggaggatgtagcggattatacggggatcagcagaagttatctctttcgtgcatttcaagcatatcagaagcagtccccaaaagaatatctgacggaatatcgaatccgtcaggcgtgccatcttctcagggagaccgggctttccgttgcatccattgcgtattcggtaggatttgaagataatctgtatttttccaaggcattcaaaaagaagatgcagatgagtccgtcccagtaccggaagcatcacatgccataaattcaggaaaagccgcatatactggcaataacgagagaaaaggattgtgagtcaattgcgttggaaatggatggggagagtgctaacagtcacctatgtttttttgttgctggggattcagccgtttgtgaatattccggcagagagggaagtacagcctgtgagtgcggatgtggagcagacagaagaaatcagaccaaagatcgcgctgacttttgatgacggaccgagtgcagcgtatacagagaaacttctggacgggctgagagagcgggatgtgcatgctacgtttttcctgatcggagagaatattgaaaaaggcgacaatgctctgctggtgaggcagatggcaagagacggacatctgattggaaatcacacgtatcatcatgttcagctgacgaagatcaaagaagaggaagcgctcaaagagctggaggagacgaaccgtctgatcgagaagatcacgggaaatccggtagaatatgtaagacctccttttggagaatttccaaagggactttccgcaaaaatttccatgatcccggttatgtggacagtggatccgctggactggtctgtaaaagatacagagaaaattgtcagcaaagtagtgacgcaggcaaaagaaaatgatatgattctgttacatgactgttacggaacctctgtggaggcggccttgcagatcatagacagactgaaagaaaaaggatttgaatttgtgacggcagacagattgcttctgccttagaaatagaggagatatataagatgaatgaatattccagaacagaacttttgatcggagaagaagggctggggagacttaagcaggcgactgtcatggtatttggtgtcggcggcgtaggctctcactgtatcgaagcacttgcaagaagcggtgtgggcaggctgatcctgatcgataatgacaaggtttctctgacgaacatcaaccggcagtcgatcgcatatcacagtaccatcggacggatgaagacggaagtgatgcgggagcggatccgggatatcaatccggagattgttgtaaagacctatgagacctttgtactgccggataatgtggaagaattgtttgaagaaactccggattatatcattgatgccatcgatacggtaacggcaaagctggcgatcgcggaactggcgcagagaagggagatcccactgatcagcagtatgggaaccggcaacaagctgcatccggaactgtttgaaatcacagacctgtcaaagaccagtatgtgtccgctctgcaaagtgatgcggcgggaactgaaagcaagagggatccggcatctgaaagtattgtattcaccggaaaaaccagtcgatacgtccggacgtgagaccggagaggacaaaggagcccgccgtgtacttccgggcagcatttcctttgtaccgccggtggcagggcttttgattgcaggagaggtcatccgcgagatcagcggtgtctgaaatatacagaagccggcaggaggaagagtatggatttatttgattatatgagagaaaaaacacaggaacaggaatctcccctggcatccagaatgcgtccgcagatgttggaagaagtagtgggacagcagcatattatagggaaagacaagcttttgtatcgtgcgatcaaggcggataagctgggatcgatcattttttacggacctccgggaacgggaaagacgactcttgcaaaggtgatcgcacatacgaccagtgcggagttcaagcagatcaatgctacagtagcaggaaaaaaagatatggagcaggtggtaaatgaagcgaaagaactgctcggaatgtatcgcaaaaaaacgatcctgtttattgacgagatccacagatttaacaagggacaacaggactatctgctgccatttgtggaggacggtaccattaccttgatcggagcaacgacagaaaacccgtattttgaagtcaatagtgcgttgatttcccgatccagtgtatttgaattaaaatctctgggaaaagaagatattcgcaccctgttgaagcgtgcggtttatgatgagaataagggaatgggaagctttcacgcagagattgacgaggatgcgctggagtttctggcagatgtatccggcggagatgcaagaagtgcgctcaatgccattgagcttggtgttttgacgacagagcgcagtgaggacggcaagattcatattacgctggatgtggcgtcagagtgtattcaaaagcgggttgtgcgctatgataagggtggagacaatcattatgatacgatttctgcatttatcaaaagtatgcgtggatctgatccagatgctgcagtgtattatctggcaaaaatgctgtatgcaggagaagatatcaaatttattgcccgcaggatcatgatctgtgcagcagaggatgtgggaaatgcagatcctatggcgctcacggtggccgtctccgcagcacaggcagtggagcggatcgggatgccggaggcacagattattttatcgcaggcagtactgtatgtggcgactgcgccaaaaagtaattcggcggtcaatgcgatttttgcggcaaatgaaaatgtacggcaatataagaccacggttccgtcacatctgcaggatgcacattacaagggttctaaaaatctgggacatgggatcggatataaatatgcacatgactatccgaatcattatgtagaacagcagtatcttccggatgaaatcaaaaacgccaggttctacgaacccggcgatcttggctatgaaaaacaaatcaaagagcatttacaaaagcttcgcaagcagtagggtatagatatcctggctctgggaagcccagtttccggcaatggcttcagcttctgattcggtaggaaccgtgagtttcagatcgatcaggctgaagccgttttctacaatctgacagcagacctcatattcatggttggtgttcagatagtagtcggacttgacagaaacctcttctttcagatcatacttcttttctttgagaaattcatcaatatcccgctgaatggcaggggaaatcttgtttttaaagtattggatggtgtccagaccgttgtctgtcagatgatacagagtacggttgtgtgtcgtttccacgcggagcagtccggaatgttccatttcagcgagtgtttcctgaagcttaaaataagttgtgtattctttttccagaataaattcggaaatctgtgaagttgtcaatggaaaatccactttatccagcatgtacaatacgatcagtttatacagtgtataagtttcagacatagtactcctttccctgccagatatcctgttctttcaggtggctgtgaagctgatttaatacggttcttttattgcttgtccaaagaggggcgatcaaaaggtctttcggtccgtctccggtcaggcgatgaatcacgatttcggggttcaactgtgcgatgcaggtaccgagaaactgaatataatcctgcatatcgggaatataaaaggggtgtttttcatagtcggctgcaaggtctgtgtgggttaagacatgaagcagctgcagtttgatcccctgaatatccatatgattgagatagtggatcgtatccagcatatcgtctttcgtttcacccggcagatatagaatcgtatgaacaattaccgtgatgccgatggcacgaagttcttttactgcctgttcaaatactgaaagctcatatccgcgccggatgtaggcgctggtttcgggatggatggtctgcaatcccagctctacccagacaggtttgatgtggttgatctcatcgagcagtgcgaggacatctgctcccagacaatccggtctggtggcaatggagagaatcttcacctccggatcagcaatggcttccatataaagggcgcgaagtgtttccaccggcgcataagtgttcgtaaatgcctgaaaataggcaatataagagtgcaccggacgtttggaagaaatatctgcttttccctgtcttatctgttcggcgatggaaagtctggcagagccggcaaaatcacctgacccctgggaactgcagaagatgcagccccctgttcccacatgaccgtcacgatttggacaggtcattccgccgtttaaggcgattttgtaaactttttctttgaacatctgttttaattcataatccagagagtggtatcttttttcaccccagcgcatgatcagatcagttcctttaccgctttgctgactacgtcggcaacacgggaatcaaatgcttccgggagaatattgttttcattgagttcttcatcagaaacaagacttgcaatggcattggcggtagcaagtttcatttcttccgtgatctgtgtggcgcgcccttccagcgcccctttgaaaattcccgggaaagcgacaacgttattgacctgatttggaaaatcagagcgtccggttccaacaacgcgtgcacccgcttcttttgcaagatccggcatgatctccggcaccggatttgccatggcaaagagtatggcgtcggaattcatggatgcgaccatctcttttgtgacgataccaggagcagagacaccgacgaaaatgtcagctccacacatggcatctgtaagagaaccggttttgttttccaggtttgtcacttctgtcatctttttctgcatccagttcaggttcggtgatgcgctgctgatgattccgttgatatcacacattgtaatatgttcaaatccgtaggtcagaagcagttttgtgatggcaactccggcagaacctgcaccgtttacgacaacgcggcagtcttctttcttctttccggttactttgagagcattgatgataccggcaaggacaacaatggcagttccgtgctggtcatcatgaaagacagggatgtccagaagctcttttaagcgttcttcgatctcaaaacaacgcggtgcagaaatatcttccagattgattccgccaaatgcaggtgcaatgttgacaacggttttgataatctcttctgtatcctgcgtgtcaaggcagatcggaacggcattgacaccgccgaattctttgaaaagaactgcttttccttccataacaggcatggctgccagtgctccgatattgccaagtcccagaaccgcacttccgtcagaaactacggctacggtgttggatttgattgtatatttgtaagcagcttcgggatcttttgcgatcaccttacaaggttcggctacacccggtgtgtaagcaattgccagatcttctctggaattgacatgtgctttggctgcagtttccagttttccgttccactgttcgtgcatctgtaatgctttttcgctgtttgtcatagtttttacctcgctgattcttagatttcctgtgcagaacacattcttccataatcataacactgttaaggaaacggtgcaagatttcaaaaaaaactttcttttttggaaaagatgcgctataataaaaaaacaaactttacaaaattgttcaagttaagtcagttcagacaaagatccccaagagattgaaagtaaaatgaataaatgaaaagtgaattttgagaaaggcaggtaattatgacaagagaaaaatatgaatcgttaccgctcgctacattgcgggaattggcaaaggcaagaaaaatgaaaggaatttccactttaaaaaaaggagatctgatcgaagcaatgctggcgcaggatgataaagagaaacaggaagaggccaacgcacaggcaaaagaagaagtgaaagagaaaaaagagggaacggatatcgaacagcttgacagcgggcgtactgcaaacggaattttagaggtacttccggacgggtatgggtttatccggtgtgaaaactatcttccgggtgaaaatgatgtatatgtgtcaccatctcagatccggcgcttcaatttgaagacaggagatatcatcacaggaaatacaaggattaaaacacagtctgaaaaattcagtgcacttttgtacgtatcgaccatcaatgggctgcgtccggcagaagcagtaaagcgccataattttgaagatctgactccgattttcccgaatcagaggatttctctggaaacacccggagcaacgactgcaatgcggatcgtagatttgctctctccgatcggaaaagggcagagaggaatgatcgtatcacctccgaaagccggtaagacaacccttctcaaagaagtggcactctctgttcagaaaagagagccggacatgcatcttctgattcttctgatcgatgagcgtccggaggaggtaaccgatatcagggaagcaatcgcgggaccaaatgtggaagtaatctactctacatttgacgagctgccggaacatcacaagagggtatccgagatggtgatcgagcgtgcgaagcgtctggtagagcatggaaaagacgttatgatcctgttagacagtatcacccgtctggcaagagcgtacaatctgactgtgccgccgtcaggaagaaccttgtccggtggtcttgatccggctgcactgcatatgccgaagcggtttttcggtgcggcaagaaatatgcgtgagggcggaagtcttacgatcctggcaacagcacttgtggaaacgggaagcaagatggatgatgttgtttatgaagaatttaagggaaccggtaacatggagctggtgctggatcgaaaacttcaggagaagagagtgttcccggcgatcgatattccgaaatccggaaccagaagagaagatctgctgcttaataaagaagagcaggatgcagtttatatcatccgaaaggcaatgaatggcatgaaagcagatgaagcagtggacaatctgctgaatatgttctcgcggacaagaacgaatgccgagctggtgcagacagtaattcgtcaaaaatttatctaaaatcactcttgtacgaaagaaaatacttgattctgactcacaaaacagatattatattctggttggtgtcctgcaaaatgtgacaaaatgcgggatgttcaagaatacttgaatgatgagaaactgaggaggaaatcaagatgtttcgtgaagaaattgacatggcaggaaatgcagccaaaaagaaaatccagttcctgcggcagcagacaggggcatacttcgtctcagcaatgctggcgggaatgtttgttggatttggcgttcttctggcatttacagcaggtggaatgttaaaagaaggcggtgtgccgggtgtgaagtttattatgggaggctgctttggcgttgccctcagtctggttttgatggcaggagcagagctctttacaggaagtaattttgtgatggctgttgggatgtttcagaagaaagtgacatttcaggattctgtgacagtgtgggtgacctgctggctcgggaatctggcaggctctgttctggtagcaggaatgtactctctgacaggactctgtacaggaagcgtacaggcgatcatggcagatactacagcgatgaagatgtctgtagaaccgctgccgctgtttatgcgggcaatactctgtaatatcttagtatgtctggcagtgtggtgcggaattaaaatgaaaacagaaacaggaaagctgattatgacgttctggtgtctgatcacattttttacagcaggatttgaacatagtgtggcaaatatgtctctgatgatgatcggtcttttgaatccggcacagtacgatatcagcatcggcggatatgcctataatctggctgttgtaaccattggaaatatggtgggcggtattttgttcctggcagttccgtatttcctgattggaaaagaaaaagtagcaaaaaattaaaaattgaaaaaagataaagttttcttattgaaaaaacttgcaaaacagaaaaaactatgctattatggtgtagctgtttagagattagaataatattttaaaatagagaggtgaaaatcatgagagaaggaatccatccagagtaccatcaggcaacagtaacttgtaactgtggaaacacatttgtaacaggatctacaaacgagagcatccacgtagaaatctgctccaaatgccatccattctatacaggtcagcagaaagctgctcaggctcgcggacgtgttgacaagttcaacaagaaatatggtattaaataggaaaagactatggcaggctgaggtgaatgtatctcagcctgtttttcgtatatagaaaaacaggagggcagtatgaagtcatcaaatataggcgggcaggcagtgctggaaggcattatgatgaaaaataagacacggtatgcagtggctgtcagaaaaccggatcagcagatcgaggtttgcgtcaaagaatacaaaggcatcatcccctggcagggtgtatataaagtgccgttcatccgggggatctttaattttatcgattcgctcgtgctgggaatgaaaacgctgacctattcggccagctttttcgaggaagaagagggggaagttcttactgaacaagaggcgcaaaagcaggaaaaacaagaaaaaatcatgatgggctttacggtggcattttctatcgtggcagcggtcgggatttttatggtcctcccgtatttcctgagtgatcttttgaagaattatatttcgtccagaggggtacttactgcgctggaaggtgtgatccgaatggtagtctttcttttgtatattggtttgatctccagaatgaaggatattcagaggacgtttatgtatcatggggcagagcacaagtgtatcaactgtattgaacacggaatgccgcttacggttgaaaatgtaagaaaaagctccagacagcacaagcgctgcgggacaagttttctcttttttgttatgatcgtcagtattattttctgtttttttatcacagcagaatcgcaggtcttaaaagtaggaatccggattgcgctgatgccggtgatcgcgggagtttcttatgagatcatccgtctggcgggaagcagtgaaaatcctgtggtcaatgttttgagcaaaccgggaatgtgggtgcagatgatgacgacaaaagaaccggatgacagtatgatcgaagtggcaatccgggcagtggaagaggtattcgactggaaggcgtatctggaagaaaatttttctaagacagaggaatcttttggggaaaacaagtgtacacaggaggaatgtgccttatgacctggaaggaagcctggaaaagaggagcgcagagcttacaaaaagccggcgtggaagagtatgatctggacgcctggtatttattggaacatgtgaccggaattacaaaggcttcttattatatggagccggagcacccgatgcacgatcaggaggagcgagaatatctggagctgatcagaaagagaagtacacggattccgcttcagcatctgacaggtgttcaggagtttatgggactggaatttctggtcaacgaacacgtgctgatcccgagacaggatacagaagtactggtggaaacagcgttggatgtgtgcaaacaggaacagatgggagaaatccgactcctggatatgtgcaccggttccggatgtatccttctgagtctcctgcatgaattaaagccccgaacagtgacaggtgttggcgtggatctttcaaaagaagcgctgtgtgtggcagagaaaaatgctgagaagctgaagatcgatgcagagtttctggagagtgacctgtttgaaaatgtaaagggaacttatgatgtgattgtatccaatccgccgtatataagaacttctgtgatagaaacactgcaggaggaagtaaaagaccatgatccgtatcttgcgctggacggaaaagaagatggactgtatttttaccggaggatcattgaacaggcacctgcatacctgaaaaagaagggatggcttttgttggaaatcggttctaatcagggtgaggatgtcaaaaatctgatggaacaggcaggatatacgggcgtaagcgtgaaaaaggatttggcaggtcttgaccgggtggtctttggcgtgtatgataggtaggatgagtaatagaaaggacgaggaaaaagatgtttgataaattggaggatttattgatccgctatgaggaagtcatgggcgagcttcaggagcccggtgttgcaaatgatccggagcgtttccgcaagctgatgaaagaacaaagtgatcttgctccgatcgtagaggcatataatgagtataaacagtgtaagcagaatatagaagacagcctgatgatgctggaagaggaatctgatgaagagatgcgcgagctggcaaaggaagagttgaatgagtctaaagccagagtggaagagttagagcaggaattaaagatcttgctgcttccaaaggatccgaatgatgacaaaaatgtaatcgtggagatccgtgccggtgccggcggtgacgaggctgcactttttgctgcggaagtataccgtatgtatgtacattatgcagagagccgcagatggagaacagagatgatctctctcaatgaaaatggaatcggcggattcaaagagtgtgtatttatgatcacaggacagggagcatactcccgtatgaaatacgagagtggtgtacaccgtgtacagcgtgtgccggaaacagagagcggcggacggatccatacctctacgatcacagtggcagtgatgccggaggcagaggatgtggacgttgtgatcgatgaaaaagatatccgtatagacgtcatgagggcatccggaaacggagggcaatgtgtaaacacaacagactctgcagtgcgtctgacccactatccgacaggaattgtgatctacagtcagacagaaaaatcacagttgcagaataaagaaaaagcattccgtctgctccgttccaaactgtatgaactggaactggaaaaacagcagtccgcagaagctgaggcaagaagaagccagattggaacaggagatcgttctgagaagatcagaacttacaacttcccgcagggacgtgtgacagatcacaggatcaagctgacacttcataaactggatacgattttgaatggagacctggatgaagtaattgacagtctgatcgcagcggatcaaagcgcaaaattggccaatatgaatgaatagaatataaaaaagaaatagaaatcggtatacagaatgaaaatgtagccgatttctgtttttttctctacggtaatactatttttggcggacttatcgtccattgtgtcaactgtaatttttttcaataacagtttccactacatcatcaaaaaccaatctgttaaaaagaaactggaggacaatgaaactttgtcagagaaggaacttatgctgcttatcattcttccacttgcaaagaaaggcaaagaagtgaagcagaaagtgattgagcaagtagtagatttggcgaaacagattgaagatgaaaacacacaggcatttgttatcctggtattttggtgagcagtgataaatttatagacagagactatgcgaagtcagtaaggaggtatttgagcatgacgaaagtattccagagtttagaagaagagaaattagaggctgtaaatattgccaaacgaaatgaacggcatgatactaatgtggagattgctaagagcctgcttcgtgacggaatagatacagtagtcattatgagagcaacaggctttttaaaagaacagattgaagaaatccgtaacaatatgttgacaacaaaatagggtatcagaacaggctgtcatttaccgagaggtatctggcagtctttttgtatacttagcttttggaaggtgtattggggtggctctgtgtttgtccagaccttgatattgtattcgtggtgtatgattggtatccaagtaagaatgaaaagttattatatcaaacagctttacttgttttcgtactcagtagcttctttttttaatttaaacatacaataccacctttcatagtatctattgtattttagaagtcaatgtgttaatctatttaagatataatatattttatattataaaaaataagaaaaagcatgagaaggaaaagtttatggaaaaacctgatgcttgcaacagcactgacagttgtattggggactgcaccagtgacggcgtttgcagcagatgtagattcaacagtgacagaggcagagcagacaacaccgcaggcagacacaactgtcaaggaagaagttgctgaaccagaagtaaaggctattacggtagacgtaacaacaagttctacgacattcgatggtactcaggatatcgtaatcacatacacagtaaatggtgtgcaggatggttttgaaccatatcaggatattccgtggtttgatgggcatccacaggatgttatcgaggagaatgtttcagatacggtatacaaatttacaattacaaaggctgcacagcaggcttgtatagagagaaataatgcaactgatggacagatatttgtattcgattctaagtattctacaggttcagtagatttcccaacagtcacactgacatacacaacaggagataacggcggagacaacggaaatagcaacacaaacaaccagacaacagcaaaaccaacaacaacttctccaaagacaggagatgcaacagctacacttccagtagcaggaacaggtcttgcttcacttggagttgctctggctactgtattgagaaagcgtaaataatttcaataaaatcttaacgaagacctttactacaaacatgtggtgaaggttttcttcattttcttcagattctgtaattcctcaagattagaaatttccttcagattcaatttcgttttattgatatgattttaaactattataaataaaaagtggaaagaaggtgttacatgatgtgaaagacaggagacgtagccaagcagttgagaatatcagagaatacagtgagagactatgtcgatcgaggctggctcgcctgcacgattactcctacaggcagacgtcttttcgatgaagaggacattgaagtattcaagaagaactattacagaaagaagacaggagaaaatgagcaatgagatataaaagagtcatccttttttgcgtttcccaaaagaatatgctatactaacaagatatcagcgacatactatggaataaacaaatttagaaagaggatattatggaagaaattatttttagaagaccggcactggaagatcaggagctgatccgttcttattttgacaaggcaccaagtagaagctgtgagaggacatttgtagatgtgtttttgtgggctcgccactatgatgtgacatttgcggtcatagaggatacactggtgttccgtgacggaggggacgatccgggctttgcttatcccgcaggggaagagtcttgtgtgaaaagagcgctggaatttttgatgaagtatagtgaagaacaggggtatccgtttaagctgtacaacgtgacagcggagaatttcgcacagatagaagcgtggtttccgggtgagtttgaattagaatatgacagagaccaggcagattatgtgtatgagtctgaaaaactggcgactctggcaggaaagaagctgcacggaaagaggaatcatattaacaaatttcagaagctttatccaaactggagctatgaaccattgaatgatgaaaatatggaagagtgcttccagatggcgttgaagtggagaaaccagaacggatgtgaggaagatccgggcaaaaatgcggagatgtgtgttgcattaaatgcactgagactttataaagaactggatcagcggggcggagtgcttcgtgtggatggacaggttgttgcatttacgattggagaagagctctgcgaagatacatttgtcgtgcatattgaaaaggcgtttgctgatattgacggagcatatccgatgatcaatcagcagttcgtacagcatgaatgtaccgggtatcagtatgtgaaccgggaggatgatgccggttcggaaggcttgagaaaagcaaaattatcatatcgtccggcatttctggtagaaaaaggaatcctgacgagaaagaacgcgtaggtcagtaaaagaaaacggggtggtatcatgatttcaaagaaaatggagcaaatggtggcgaacagttcagcaatccgggcaatgttcgaagaaggaaacaaaatggcagaaaaatacggggcggagaatgtctatgatttcagcctcggaaatcctaatgtgccggcgccgaaggcagtgaaagaagcaatcgtttccattctggagtcagaggatcctgtacgtctgcacggctacacaaacagcaatgccgggtatgcggatgtaagacaggcagttgcggattcgcttaacgcgcgttttggcacgggattttcagaacacaatattacgatgactgtgggagctgcaggtggattgaatgtcattttaaaagcgctgttgaatccgggagatgaggtgattacatttgctccgtattttggagagtacagaagctacgtcagcaattttgacggagtgctggtagagatttccccggatacagagacatttcagccaagactgaaagaatttgaggaaaaaatcacggaaaagacaaaagctgtgattgtgaatacaccgaacaatccgaccggagtgatctattctgaagagaccatacaaaggatggcagcgattctgaatgcaaaacagcaggaatttggaacggatatctatctgatctcagatgagccgtatcgtgaacttgcctatgacaaaacagaagtaccgtatctgacaaaatattacgacaatacagtggtcggttattcattcagtaaatcattgtctcttccgggagagcggatcggatatctggtaattccggatgaggcggcggacagtgaaatgctgatacgggcagcgaacgtggcgacccggatcctcggattcgtaaatgcaccgacactgcagcagaagcttgtaaaatactgcctggaagaaaaaacggacatttcgtattatgacaggaatcgagaggtattgtatcaggggcttcgcaatctgggattttcgtgtatcaagccggaaggagcgttttatctgttcatgaagtctccggttgcagatgaaaagcagttctgtgaagcagcgaagaagtatcatattctgattgttccgggaagctcatttgcctgcccgggatatgtcagactggcatattgtgtatcttatgagacgatcataaattctctgccggaatttgcaaagctggcagcagagtacaaggagggtaaggatgaatcaggcaattttagataagattcgaaaagtagagccgtatgtgcccggagaacagccgaaagagcgtgtgatcaagctcaataccaatgagaatccgtatccgccggcgccgggagttgcgaaggtattaaaagagatggatgcggacagtcttcgcctgtatccggatccggcagcagatatcctagtggaagaactgtccaggttttatcgtgtcgggaaggagcagatttttgtaggcgttggctcagatgatgtgctttcgatgtgctttctgaccttttttaactcggacaaaccgattctgtttccggatattacctattctttttataaagtatgggcgcagttatacagaatcccgtatcgctgcccgaagctggatgagcagttttgtctggtaaaagaagattactatgcagagaacggagggattattttcccgaatccgaatgcaccgacagcgatttatgaggatctggatttcatcgaggatattttgcgtcacaatccggactctgtagtgatcgtggacgaggcttacattgattttgcaggaaaatctgcgctggagctgattgaccgctatgagaatcttctggttgtgcagacgttttcaaagtccagatccatggcagggatgcggatcggatttgcaatcggaaatccggagctgatcggatatctaaacgatgccaaatattcattcaactcctacacaatgaatcaggcggctctgctctgcggagcgcagagtgtgaaggaggaaacgtattttcacgaatgtgtagaccggatcgtagagacaagagaatgggcaaaacaagagcttgcagagcttggatttacatatacagattccagagcgaactttctgtttgtcacacatccggaatttgaggcatctgaactgtttgaggccctaaaacgggagaaaatctatgtgagatactggaacagcgagagaatccgtcagtatttgagaattacagtaggcaccagacaagaaatggagagtctgctggaatttttgaaaaaatatagtaaggaaagaggaaaaggtaaaaaagaatgttaaaacagattttacagggaatggtagttggaattgcaaatatcattccgggtgtcagtggtggaacaatgatggtggcaatgggattatatgatcatctgatccatgcaatcacacatttaaaaagtgaattcaaaaaaagtatgaaacttctgattccgatctttttaggagccggaatcgccattgttgtgttgtcccgtctttttgaatatttactggaggtgtatccgattccgaccaattttgcgttttgcggtttgatcgccggaagccttccgtttatttttaagaaagtcaaaggacattctgtgacagtcggaaagatcattccgtttttgatcttctttggaatcgtgatcacaatggcacttttaggagagacaaatggtgctgccgcggatgtgagctttggggttgtcaatgtgatcaaattattcctggtaggtgttgttgcggctgcgacaatggtagtgccgggggtgagcggatcgatgatgctgatgctgctcggatattatgatacgattttgaaaacgatcaatcagtttatcgatgcactgatcgcatttgatgtccagaagatcctggtgcagtgtggaattctgattccgtttggaatcggcgttgtgatcggaatctttctgattgcaaagctgatcgagtttatctttatgaaagcggaaatccatgcatattatgcgatcatcggtctgattctggcatctccgatcgcaattttgttaaaagtagactggagcggactctctgtattgacgatagtagtcggaatcgtgacattttgtctcggatggtttacagcaagtaagcttggcggagaataaaaattaaaaaagaaagggaagaatgcgcaatttattttggcatccttcccttttttgtatcctgatcttgtagaaattcggtgtattcgaaaagctgttgtctggaatccgaagacagattcagatacgcacagagcagacggtattcggaagaatccggcggaacagaaataccgttggtttcagagcctgtgagcagataatcaaccgatacgtgaaaatagtctgcaatctgaagcaaacgttcgtagtccggctgctttccttttgtctcatatcccgcgattgtggagcgggtaagttttaggtgagaagccagctggttctgggtgacatgattttgttctcttaattcttttaatgtagatgaaaacttcatatgtacctcctgaataatgtgtattttaacagtttgcttccatttattgacaaaaagtgacaaatatcaacaaaatgaataaaaaagtgacgaaaagacactgtctggcagaacggggaaacacattgacacctccatggaaaatccgtataatgaaattgaagaaaagaaaggatgacagaaagtatgtttgcaaaaaatgatgaagaaaaaagaaatcgtctttggaagactgcgatatcagtatccacactggttattattctgatcgcagtattctttgtgataaaattatttacatcgaatcctctggaaggaacgtgggtacgggaggacagtgatctgatgctgacgatctcgggagaggatcaggcggttgtgcagtggccggaggagtttgaatcagcagatgtaagagtttcggtagagtgcagcgtagatacagatatgaaagtgatcactctgcatacagatgctgccgaattgcagaaagcagcagaggagtccggtgtagatacagccaaactggatactgcactgcagaagctggacggtacgtatgaatataatctggagcagaaagaactgacattgactgaacgggaatatggcagccagatgacatttacaaaaaaataaggaacagacaaagacggtggatgcggggatttttaaaaaatttctcatccgccgtaaatttaacattatttttgggagaacaggaggaaaaaatggagatgttgagaaatcgaacaaaagaaatacggattggaaatgtatggatcggaggaagtcatccggtagcgatccagtctatgacaaatacaaagacagaggatgtggcggcgacagtggggcagattctcgctctggaggcagcgggatgtgagattatccgctgcgcagtgcctacgatggaagctgcgcttgcgttgaaagagatcaaaaagcagattcatattccactcgttgcagatattcattttgattaccggcttgccattgctgccattgaaaacggggcggataagatccgtatcaatccgggcaacatcggttccaaagagcgtgtgcaggcagtagtcgagaaggcgaaagagtacaatgtgccgatccgagtgggcgtcaacagtggttctctggagaaaaatctgctggaaaaatacggtggtgtgacggctgagggaatcgtggagagtgcgttggataaagtacgcatgatcgaggaaatggggtatgacaatctggtggtgagcatcaaatcttcagatgttctgatgtgcgtcagagctcatgaactgattgcagaaaaatgccagtatcctttgcatgttggaattacagagtccggaacggtttactctggaaatatcaagtcttccgtaggacttgggatcattctgcatgaggggatcggaaataccatccgggtctctctgaccggagatccgacagaagaaatccgtaccgcaaagctgatcttaaaaacactgggaatgcgaaaaggcgggatagaagtagtttcctgcccgacctgcggacgtaccaggatcgatctgatcgctcttgcaaatcaggtagaaaagatggtgcaggacattgatctggatataaaagtggcagtgatgggatgtgtggtcaatggccccggagaagcaaaagaagcggatatcggaatcgcaggcggtatcggagaagggcttctcatcaaaaaaggtgagatcgtaagaaaagtaaaagaagaggaattgttagaaacactgcgtcaggagttattaaattggaacaggtaaagaacgaaaagacattttttgaggttttcccgaccttgcgggcagatggagaattgaaaatgttgtttcaggatgtggaagtgaaaaagatcacgaccaattctacacgagaatttttgcatattcatatggtcagtcatcatctgatcccgaaaaaggtgatctggaaaatggagcagagtatcaaggagcagctgtttggaacggcatcggtggcaatccagatcgaagagttttatgtgttatcggagctgtatacactggagacgctgcttgcagaatacaaggagagtcttgttctggaactggaaaagaaaagtgtactggcagccagtatgtttgaacaggcagagctgcatttcgaaggggaaaaaatcgtatgtgtagagcttttagacagcattgtttcggaaggaaagaaagaatatatcgtgacgcttctggaagaggtactgagccgcagatttgggatgcaggcggaaatccgtgtactttaccgggagcaggaggaaaatcagagccgggaatatgatgagcagcgcatccggcaggaaatcaatgcgatctttgagagaagagcaagacaaaagggagagattttgcagaagccgatttcagagaggcagacggactctgcaaaagagaagaaaacagcagattccggcaagaaggagagtgcaaaatccggattcaaaaaaggagaattcagaaagaaagagttccagcgtccgcttaagcagggggatgatccgtctcttgtttatggtaagaattttgaagatgaacctctgactctggatcaggttgtcacagagatgggtgagatcactattcatggtaagatcatcagctttgatacaagggagatccgcaacgagaaaacgattctgatgttttctgtgacagattttacagacacgattacagttaagatgtttgtaaggaacgatcagctggcggagcttttgggagatattaaaaaaggggcctttgtgaagatcaaaggggtgacgaccattgacaaattcgatggggagctgaccataggttctgttaccggaattaagaagattggagactttactgtttcgagagaagatttaagcccggtcaaacgggtggagcttcattgtcatacaaaaatgagtgatatggacggtgtgtccgaggtgaagagcatcgtaaaaagagctcatgactgggggcatccggcaatcgcgattaccgatcacggagttgcccagtcgttcccggatgccaatcattatatcgagacgcttgataaggatgatccgtttaaagtaatctacggagtggaaggatatgtggttgatgatctgacagagattgcggtcaatgccggggagcagacactggatgacacatatattgtgttcgatatcgagacgacaggtttttctgcaatcaaggataagattatagagatcggggcagtgaaggtaaaagatggtgctatcgtagaaaaattcagtacatttgtcaatccaaaacgtccgattccgtttgaaattacacagctgaccagtatcacggatgagatggtcttagatgcaccggatattgagagcgtactgcctgagtttctggaatttgtgggagatggtgttcttgtggcgcacaatgccgggtttgatgtgggctttatcgagcagaattgcagatatcaggagatcgaaccggattttgtctcagtagatacggtggcgcttgcgagagtgctgctgccgaccttatcaaaatacaagctgaatatcgtggcaaaggcactgggaatctctctggaaaatcatcaccgtgcggtggatgatgcaggagcaacggcggaaattttcgtgaagtttgtagagatgctcaaagacaggaatatcacaacgctcaaagagatgaaccggtttggggatatgaatgtgaatgccatccggaagctgccaacacaccatatcatcattctggtaaaaaacgatatcggaagattcaatctgtaccagctgatctcagcttcgcatctgacatattttgcgagaagaccgaggattccgaaaagtcttttgaatcagcacagagagggtctgatcataggaagtgcctgtgaggccggtgagttgtatcaggcgatcctgaaccagaaatctccgcaggctgttgcaaggctggcagaattttatgattattatgaaatccaacctcttggaaacaaccagtttatgatcgacagtgaccggtatggagatatcaattccaaagaggatctgcaaaatatcaaccgggagatcgtcagtcttggggaaaaattcaaaaagcctgtcgtggcgacctgtgatgtacattttctggatccggaggacgaagtgtaccggaggatcatcatggcaggaaaaggattcggagatgcggacacccagcctcctttatatcttcggacaacggatgagatgctggaagagttctcttatcttggttccgcgaaagccagggagatcgtcatcgacaatccgaacaggatctgcgatatggtggaaaagatctctccggtcaatccgaacaaatgccctccggtcattgaaaattctgagcagaatctaagagatatctgttacaacaaagcgcatgagatttatggagaaaatctgcccgaaccggtgcagaccaggctggagagagaactgacatccatcatttccaatggatattcggtgatgtatatcattgcgcagaagctggtgtggaaatccaatgatgacggttatctggtaggttcccgaggttctgtaggatcctcctttgttgcgactatggcgggaatcacagaggtaaatcctttgagtccgcactattattgcagtgagtgtcattacagtgactttgattccgaagaagtccgcgcatttgcgggtggatgcgggtttgacatgccggataaaaactgtccgaactgtggggccaaactggtaaaagccggatttgacattccatttgagaccttccttggatttaaaggagacaaggagccggatatcgacctgaacttttccggagactaccaggcaaaagcgcaccggtatacagaggtcatcttcggagaagggcatacgttcaaagccggaaccattggtacactggcagataagacggcatttggatatgtgaagaattattatgaggagcgcggacatcggaagcggaaatgtgagattgaccggattttacagggatgtacggggatcagaaggagtacgggacagcatccgggaggaatcgtggtattgcctcacgggcatgacatcaatgagtttacaccggtacagcacccggcaaatgatatgactacggatattattacgactcattttgattaccattccattgaccacaaccttttgaaacttgacattctggggcatgatgatccgaccatgatccgtactctggaggagtatattacatctgatgcgctggagaatgagtacaatgacgagaatccgtttgatgcgacaaagattccgctggatgataaaaaagtactttctctgtttcacgataccagtgcattgggaatcaaacctgaggatattgacggctgtaatctgggatgtcttggaatcccggaattcggtacggatttcgtaatccagatggtacaggatgccaatccgcagtctctttctgatctgatccgtatttccggtctgtcccacggaacgaatgtgtggcttggaaatgcacaggttctgatcgaatcgggaaaggcaacgatttccactgcaatctgtacccgagacgatatcatgatctatctgatcaatcagggtgtggacagcgcgctgtcatttacgatcatggagagtgtgcgaaaaggaaaaggactaaagccggaatgggaagaaaccatgaaggaaaaggacgtgccggactggtatatctggtcctgtaagcagatcagctatatgttcccgaaggcacatgcggcggcatatgttatgatggcatatcgaatcgcttattgtaagatcaattatccgctggcttattacggtgcgtattttgggattcgtgccaatgcattttcgtatgaactgatgtgtcagggaaaggataaactgaattactacatgaaagattataagcgccggtcagattctctgagcaacaaggaacaggatgtactgaaggatatgaagattgtacaggaaatgtacgcaagaggttatgagttcctgcctttggatatttacaaggcgaaggcaacaaaattccagatcattgacggaaaactgatgcctcccctctccagtatcgaagggatgggagaaaaggcggcagaggctgtggaggaggctgcaaaagacggaccgtatctgtctttggatgatttcagacagcgaacaaaggtgagcaagaccgtgatcgaatttatgtcagacctggggttgtttggaaatcttccgcagagcaatcagctttccttgtttgacttttaggcaggatatggtaaatagggcaactgttactttgctgcgtcacatgaataaagtggcgtagcaaagggagagaatggaggaagatgcgatgtatgattttgaagaaataagaaaagaagatccggaaattgcagaagcgattcaggcagagatggcaagacagaattcccatattgagctgatcgcctcagaaaactgggtgagcaaagcagtgatggcagcgatgggaagtccgctcacgaacaaatatgcggaagggtatccgggaaaacgttattatggcggatgccagtgtgtagatgtggcagagaatctggcgattgagcgtgcgaaaaagctgtttggctgtgaatatgtcaatgtacagccgcactccggggcacaggcgaatatggcagtgcagtttgcgatgctcactccgggagataaagtgatgggaatgaacctggatcatggtggtcacctgacgcatggatctccggtcaatatgtccggaaaatattttgagatcacaccgtatggtgtcaatgaagaaggcgtgatcgattatgaggaagttcgaaggatcgcgaaagagtgccggccgaagctgatcattgcgggagcaagtgcctatgccagaatcatagattttaagaaattccgtgagattgcagatgaggtgggagcttatctgatggtagatatggctcatattgcaggtctggtcgcagcaggacttcatccgagcccgatcccgtatgcacatgtgacgacaaccaccacgcataagacactgcgcggaccacgaggcggcatgatcttaagcagcaatgagatgaatgaaaagttcaattttaacaaagcaatctttcctggaattcagggaggtccgctgatgcatgtgattgcagcaaaagcagtgtgcttcaaagaagccctaagtccggatttcgttgcatatcaagagcagatcctgaaaaatgcgaaagcattgtgcaatggattattagagcgaggtgtgaagattgtatccggtggaacggacaaccatttgatgctggtggatctgactggaaccaatgtcagcggaaaagaactggaaaagcgtctggatcaggctcatatcacctgcaataaaaatacaatcccgaatgatccgcgctctccgtttgtgacaagtggtgtgcgtctggggactccggcagttacaagcagaggaatgaaagagcaggagatggaccagattgcggagatgattgcaatggtgatccaggatgagaaaaatgtagaacaggtaaaagaaatggtgcagaagctgacagaaaaatatcctctgtgctaaagaagacgataaaaagaatctgcctccgtatcgggaagcagattctttttataatctcgttttgttgtataacttttaaatattaaattggaattatataattaaaaggtacatctaaaatctgattaaagctttactacgtttgttgcctgaggtcctttagcgccttctgttacttcgaattcaacagcctggccttcttctaaggatttgaatccatccattacgagtcctgagtagtgtacaaatacatcatttccttcggaatcagagatgaatccataacctttttggttgttaaaccattttactgtacctgtcattgtgttacctccataaatttgaaaataaataataaagtatatcgtattgcttatccaatcaaaaacaatacttcgtcattttagcatatttaacaatgagtgtcaaatgatttcttttggtatttgtaaaagtatacaaaaaatgtcgaaatgtgtagaaataaaagcattttctataaatcttgtgcaaaagaaactgaaaatgagagattgtatttacacaggatttctattaaaatagaggaagcaaaaagtgataaaggagaagccggaatatgaaaatgtctacaagagggcagtatgcactggaaattgcagtggatcttgcgctgcatctgatgccggattgtctggaaagtctgaatgatatcgcaaagaggcgaaatctttcagaaaaatatctggagaggattatgaagcttttaaaagaggcgggtcttgtaaaaagtgtgcgcggtgcatatggaggatattgcctgacgaaggagccgggagaaatttctgtattggaagtgcttcgtgctgcggaaggtcagctggcaccggtatcctgtcttgttgaaaataccgagtgtggaatggaatgcgaaatctgctctacgaaaagtacctggggtgagatgtgggagcagatactggatacggctgcagaggttacagttgcagatattgcagagatcgtaaagaaaaaagagacctgttagaaagagtgccggagggcggttttactgcctgacggtactctttttgttttatggtttaaagctgtttttggagttgctgtgttcatcttttggataaaataatttcaagaaaatatattaaacatattgacatggtaggaaaaaagaggtataacaataaaaacattactaaatcgataggaattaaaggaggagtgccatgaaagtatcgacaagaggaagatatggactgcgcgccctggttgatatgaccattcattcgaataatgctccggtttcgcttgttcaggtcgcaaacagacagaagatttctctgaattatctggaacaggttttcggaacattgagaaaagcaggcattgtggtcagtgtaaaaggagccggaggcggatataaactggcgagagatgcagagtccattacggtcaaagaagtgctggaggcactggaaggaaccttttcgatcatagaccggattccgggagaagagcaggatgcagttcaggaggcaatcgagaagcttgtatggagcaggattgatgaaacagtcaatacatttctggaacagaaaacgttaaagatgctggcggatgaataccgggaaaaactggaacagaacgcgggcatgtactacatttaaaaacgatgcaatgaatataggaggacagacatatggcaggaatttatcagagtgtaacagaattaatcggaagaactccacttctggaagtaaagaatctggagaaagaactgaatctccaggcaagagtgctggtgaagctggaatactttaatccggcaggcagcgtaaaggatcgggcagcgcttcagatgatcacagaggcagaggaaaacggtacattaaaacagggatctgctatcattgagcctacaagtggaaataccggaatcgggcttgcatcgattgcagcgtcaagaggatacagagcaatctttgtaatgccggaaacgatgagtatcgagcgaagaaaacttctgaagggatatggcgcagaaattgtgctcacagaaggagcaaaggggatgaaaggagccattgcaaaagcaaaagagctggagcaggagattgaaaatgcagtgatcctggggcagttcgtaaataccgcgaatccaagagcacacgaaaaaacaacagggccggagatctgggaagatacacaaggacaggtggatctgtttgtagcaggtgtcggtaccggcggaacgatcacaggaaccggtgcttatttgaaatcagtcaatccgtccattgagattgtggcagtggagccggcgtcttccgcagtgctgtcgggagaaaatccgggaccgcacggactgcagggaattggtgcaggatttgtgccggatgtactcaatacttctgtttatgatcgcatcagtaaagtgaaagagcaggaggcgtacaaagcttcccgtcttctggcagaaaaggaaggagttctggttggtatttcttccggagcagcactgtcagttgcacttttggaggccggaaaagaggaaaaccgtggaaagacaattgtagcattgcttccggatacaggagaacgatatctttccacaccgctttttgactgaaaaattagatcaaaatgttaaaaaaacgttggtcagacaaagcatatttattgcagaacacaggttgaaaaaaagcgaaagatagtatatactacaaagaaaaaaggcaaaaggagttttagtgctatgaaagaatttaaatatgtagtgacagacgcagaaggaatccacgcaagaccagcaggactgcttgtgaaaaaagcaggagaatttacatcttccgtaacaattgcaaaaggtgacaaatctgcagatgcaaaaagaatcttcggtgtgatgggacttggagtaaagacaggagaagaagtgacaattactgctgatggtgcagatgaagatgcagcaatcgcagaactggaagcattctttaaagaaaacttataattcccataaagtctgaggaaaatattatgattacaataacaggaaaaagtgtatttggtggagtgtccatcggaaaactttctttttataaaagaaatcagaaagtgatcaaaagagaacacgtagaaaatgtagaatcagagtgtgtaagatttcaggaagcaaaagctgagggaatccgtcagttaaaagaattgtacgaaaaatcgattgccgatgtcggagaagccaacgctatgatttttgagattcatcagatgatgctggaagacctggattatattgagtctatcgaaaatatcatccgttctcagaaagtcaatgcagagtttgcagtagcaacgacagctgacaattttgcgcagatgtttgcggcaatggatgatgcatatatgcagggacgtgcagcggacgtaaaggatgtttctgagcgtgtgctggatatcctctgcggagtcagcgagggaatcaagcagacagacgagccttcgatcattgcagcagatgatctggcaccgagtgagacggtacagctggataagagcaaagtacttgcatttgcaacgatgtacggttcttccaattctcatactgcgattctggcgcgtaccatgaatatcccggctgttatcggtctgggtgaaagtctgagtcctcagtatgacggaaagatggctgtgatcgacggatttacaggaacactgtatattgatccggatgaagagacactttccagaatgcagaaaaagcgggaagaagatcttgagaaaaaggcactcttggaacagctcaaaggaaaagagaacatcacaaagagtggtcagaagatcaatgtatatgcaaatatcggaaatgcatctgatgttggtgcagtcctgaaaaatgatgcaggcggaatcggtttgttccgcagtgagttcttatatctggagaatgagacattcccgacagaagagcagcagtttgcagtatacaagcaggttgcagaaaacatggcagggaaaaaagtgatcatccgtacactggatatcggagctgataaacaggtggattatttcgaactggacaaagaagagaatccggcacttggatatcgtgcgatccgtatttgtctgacaagaccggaaatctttaagacacagcttcgtgcactttacagagctgcattttacggaaatatttcgatcatgttcccaatgatcatttctgtttcagagattcataagatcaaagagatgatcaaagaagtgaaagcagagttgaaagaacagggaatcccatataaagaagatgtggagcttggtgtgatgatcgagactccggcctctgttatgatcagccgtgaactggcaaaggaagttgacttcttcagtgtgggaacgaatgacctgacacagtacactctggcgatcgaccgtcagaattcaaaactggacgagttctatgatccgcatcatccggcagtgctggcgatgatccgcatggctgcagagaatgcacatgcagaaggaaaatggatcggcatttgcggagaacttggcgcagatctggaattgacagaagaattcctgaagatgggactggatgaactttctgtttctccatcgatggttcttccgctgagaaagaaaatccgcgattgtgaataatcagatacaaaaaaggacattgtctgaaaagacagtgttcttttttgtgttggtaatttcttaaaaaagaacttgcaaacatatgttctgaatgctataatacaaaaaagaacatatgttctgaaaggagcggaaatatggcggagattattcaggaaaaaatgtcaatctatgaaaaacttcagattctgaccgatgcggcaaagtatgatgtggcgtgcacctccagcggcgtagaaaggaaaggtgatggcacaggtataggcaattgcagcaaggcgggaatctgtcacagcttttctgcggatggaaggtgtatttcacttctgaaaattttatttacgaacgagtgtatttatgactgcaaatattgtgttaatcgatcttccaatgacgtgatccgtacatcttttacgccggatgagatctgcacattgacgatggaattttacagaagaaattatatcgaaggattgttcttaagttctggaattttaaaaaatccgaactatacgatggagctgatctatgcagccttgtataagctgcgtcatgtctgcaattttcagggatacattcatgtaaaggcgattccgggagcagatccgattctgattcagaaagtgggatttctggcagacagaatgagtgtgaatctggaattgccgacagccgagagcttgagacttctggcaccacacaagtcaagaaaaaatattctggcacccatgcggctggtccaggagaagtccaaagagaacagacaggagctgacgctgtataaaagtgcgccgcgttttgtgcctgccggccagagtacgcagatgatcatcggcgcctctccggagacagattatcagatcttgcgtgtggcagagtcactctaccagaaatttggattaaagcgtgtgttttattctgcttttgtggcggtcaatgaagacaaggcacttccggcaagaacatcagatggaccgccgcttcttcgggaacacagactatatcaggcagactggctgctgcggtattacaagtttgaagcaaatgagctgctgaatgagaaaaatccgaattttaatatattcctggatccgaagtgtaactgggcgctgaatcatctggaatattttcctgtcgaagtgaatcgggcgtcatatgatgttttgctgcgtgttcccgggatcggttacaaatcagcgggcaggatcgtaaaagcaaggcggttcggatctcttggatttgaagacctcaggaaaatgggagtggtattaaaacgggcgctctattttattacgtgcagtggaaaaatgatgtataaaacgaaaatagaagaagattatattacaaggaatcttttgaatacgaaagaacgtttgccggacagtgttgcagggatgaattatcagcagttatccttatttgatgatgtaaattttaccgggaaccagatcgtgactatggtatgacaggagagggatatgaaaaagatttatatttgcagagatgacagaaccgagatgctttcggcaatttatgacgcatggaaagaaaaccgcaataaagaggtaggaatcgggcttttgggaaagacacagcagcagctgttctgcgaatatgcagaagttgtatcatccgaaaagaaagcgcaggcggtggaacgcctgatacgggatcatatgggagagcagacttatgaggatatttcttatgccctgttgtgtgaagatgcgatgaaagcagaggcgatactccatgtcatgcaggcagcgagacaggtaaagccaagtaaaaggattatggattttctgggcaatccctctgtggcaaaagtgtttgaaatgaaacgcagagtttcgaatgaagcccattattttattgagtttgtaagatttcgggagctggaaaacggagttttgttttccgagatagagccgaagaacagggtgctgacatgtatcgcagagcattttgcagatcgttttccgatggaaaactgggtgatctatgacaatacgcatcaggaatttctggtacatccggccggaaagcattgggtgctggtacaaggagaagtgccagagcggaatgtgacagagcagatcacggaagccgagaaggagtatgaaaaattgtggaaaggattttttaaaaccatctcgatcaaggaacgggaaaatttaaaatgccagcgaacacatataccggtcaaatatcgtaaaaatgtgacagaattccagtaaaaaactattgtataataggaggacttagtttaacataaggataacaaagtggcgttgataagagaaaggaaggagagatatggagagagaggcaatcgtctggctggcgctttttgttattcttctgattgtagaactgttgactgtgggtctgacctccatctggtttgcaggaggtgcactggcagcgttggttttagagctgctgggagtcgatctgatctggcagatcggggcgtttatcctggtttcatttgtgcttgtgtattttacgagaccgtttgcagtaaaatatgtcaatgcacatcatgaaaagacaaactatgaacaggcagtgggaaaaattgtcagaattacacagagagtagatgatcttgcacagaccggaaaaggaattttggacggaatggaatggacagtgaggacagacagtaaagaagttctggaaaaggatactctggcaagagtaatccggatttccggcgtaaaattgattgtagaaccgtataaggaggactagaggatgggattgatggtattaggagttttattggtattggtgatattgattctggcagcaaatatccgaatcgtaccacaggcacatgcgtatattctggaacgtctgggtggatataaagagacgtggggtgttggaattcattttaagatcccgattctggatcgtgtggcaaagagagtatcactcaaagagcaggttgtagattttgaaccgcaggccgtgatcacaaaagataatgttacgatgcagattgatacggtgatcttttttcagattacagatccgaagcagtatgcgtatggagtggagaacccgattgcagcgattgaaaatctgacagcgactacactgcgtaatatcatcggagatctggaactggatgagactctgacatccagagagacgatcaattcggagatgcgcacatcgctggatatcgctacagacccgtggggaatcaaggtgaatcgtgtggaactgaaaaatatcatgcctccgactgcaatccaggatgcgatggagaaacagatgaaggcagaacgtgaaagaagggaagcgattctgaaagcggaaggagaaaagaaatctacaattctggtggcagaaggtaagaaagaatctttgatcctggaagcggaggcggaaaaacaggcggcaatcctgaatgcggaagcagaaaagcagaagagaatcaaagaggcggaaggacaggcggaagcaatccgtaccgttcagaaagcaacagcagaaggaattgaatttattaaacaggcaggtgcggatgatgcagtactgactttaaagagtcttgaagcgtttgccaaagcagcagacggaagagcaaccaagattatcattccgtccgaattacagggaatcgctggtctgaccaagacgatcgcagaggttgcaagaccggataaagcagcagagtagagaacatgaaagaggaaacaatcataaggatatctgtccgcagccttgtagaatttattctgcgggaaggggacattgacaacagagtgtccggcagtatggaaaaagatgccatgctgctgggcggtaaaatacaccgcaaaatacaaagccgtatgggaacgaattacacagcggaggttccgcttaaaatacagatgccgtgcgatgggtttgttttgcagatagaagggcgcgccgatggagttttgaaagatgacggaaaagtcctgatcgatgagatcaaggggattttgcgaagtctggaacatctggaagcgcccgttcccgttcatttggctcaggcaaaatgttatgcttatatttatgcagttcagaactctttgaagtgcattgacgttcagatgacgtattgtcagatggaaacagaggaaatccgcaggttttgccaggaatttgaatttcaagagcttcagacgtggtttcaggatctggtgacacaatatgaaaaatgggcaaaatttgaaattgaatggcggaatgtacgcaatgattcgatccggcagattgagtttccttttccctatcgagaaggacagcgtgacctggtggcctcggtataccgcacgatcttgcgaaagaaaaagctgtttatccaggcgcctaccggagtgggaaaaacaatggcaactgtatttccggcagtgcgggcagtgggggaagggctgggagaaaagattttttatctgacagcgaagacgattatgaggacagttgcagagcaggcattttccctgttgaaagaaaaggggctgttgtataagaccattacgctgacagcaaaagaaaaaatctgtttttgtgaggaggcagagtgcaatccggatgcctgtccttatgcaaaaggacattttgacagagtgaatgatgcagtttttgatctgatcacacattccggcgactggagcagagaggttctggaagaacaggcgaaaaagtacatggtctgtccgtttgagatgtctctggatgtgtccaactgggcagatgcagtgatctgtgattacaattatgtgtttgatccgcaggctcatataaagcgctttttctcagaaagtggaaaagaggaatacctgtttctgatcgatgaggcgcataatctggtggagcggggaagggagatgtatagtgcatctctatacaaagaagatttactggaagtaagaaaactggtaaaggcagaggatccgaaactggcaaagcgtttgtcagaatgtaatcagcagtttttggaattaaagagagagtgtgaacattatcagattttaaaaagtgtatcgcatattgcgttaaagctgatgaatgtgctttcgaaactggaagattatctggaagagtgcaaggatgcagaaaagaaaaagcgggtgctggatttttattttgcagtgcgcagttttttaaatatccatgatatcatggatgaaaattatgtgatcttttcggaaatgatggaagacggaaggtttcaaatcaagcttttttgcgtcaatccggcggtgaatcttcaaaattatctggaacagggaagcagtacgatttttttttctgcaacactgcttccggttcattactataaaaagctgcttagtgttgagaaagatgattatgcagtgtatgcacatagttcttttccgcaggaaaataaatttctttttattggaacggatgtaagtacccgttatacaagaaggggagagagtacatatcagagatttgccagatatattgcagtgatggcagaacagaaaaaaggaaattatatggcgttttttccatcgtaccgttttttggaagaggtacatacgtgctttttggagtgtgttgatcacgaagtcgacagtatctgtcaggtttcgtatatggatgaagaacagagggaagagtttttggaggaatttgaacgggaaagagagaaaagtctggttgcattttgcgtgatgggcggaattttttcagaggggattgatctgacagaggacaagttgatcggagcagtaatcgccgggacagggcttcctcaggtgtgtacagaacgggaaattttaaagcagtattttaatgctgccgatatggatgggtttgactatgcgtatctgtatccgggaatgaacaaagttctgcagtctgccgggagggtgatccgaacggaaagtgacagaggtgtgatcctgttgttggatgacaggtttcgggaaatgcgataccgggaagtgtttccgagagagtggcagcagtatcaactgggaagtgtgaaaaatctggaacaagaaatacggactttctgggaaagtccgtaattgtacatcagtcaaaaaaacttaagaattcttttgctgcctttgaggtcagtacctgttcattataagcgatgacaagctcacgctctggcagttcttcttctgtctggacggcaaagagatcgcaagtctgctcagaaagacagaaattcggaataaatgcgattccgagtccgattcgtgcaagatcgatcagaagatcattgctggtcagctcgatttcaggaaccagatccagttgatgctgctggaagaggcggtgcagatattcactggtggtactgtgcttgtccagcatcagaattggatattttgacagttcctgataggaaagtttctttcctttcaactctgcaaaatcctggttggcaataaaaacatcatgaaattttttgatctttttgatcgaagagacattgcttaagtagctgtttgggtagttgaccacaatgagatcgacctgtccggattccagtaattctacacatttgatggatgtctggttgacaactttgatgtgggcatttggaaatgcttcgtgaaatttctttaaatagggaaccagaaaatatcggcagatcgtatcactggctccaatccgaatctgtccaccggtagaagctgcatccagaagctgggattccccgcgctggatcagatgcatggcaggttcgatatggcgaaggaggatttctccttccggtgtgagctggactttttttgtactgcggataaaaagcacctgatccagcttgcgttccagtgttttgatagactgactgacagcagattgtgagatgaaaagctgtttggaagcttcggaaaaactcaaagtagatgccacgtgatagaataccttatatagttcatagttaatatccattattagacctcctaataagtgctccctgtattatagggcaaaaatgaatgaattacaatctatattgtggtaaaatatacaggaatcgcagaagaatggaaaaaatgacgaaagcagaaaagactgggaggtaaaatgcgtgaaaaaagtacaatggtttttgggaatcctgttttctctggcgctgattctggtgctgctgatcagcagctttcaatttgcggcgtatggagattttggattttacgaaaaagaatataagaaatatgatgtggtctcggatcttgatatggagctgaaagatgtgatgtatgtgacctatgagatgatggattatctgatcggtgacagagaaaatctggatgtgtacacagtggtagaaggaaaagagcaggacttttttaatgagcaggacaaattgcatatggctgatgtgaaaaatttgtttcttggtggtcttatggtaagaagagtatcagcggcggtgatgatgctctgtcttttcgtactttgggtgacaaaggcgaattggaaaaagattctggcaagaggatatcagatcggtcttgggatcgccacagccggagtcgcgtttctggcaggagcgctgattgtagattttaatacagcatttacggtattccatgagatattttttaccaatgatctgtggttgtttgatcccgctgaggattatatgatccggatgctgccggaaggttttttctatgatatggcattgcgcattgggggaatcttcattatcagtatgctgatctttctggcagtcagtgtgtttctcgccagacaggccaagaaagatgaaaatgaaagaaaaattaaaagtacttatgagtgagtttaattatattaattatacttatgagaaaaaatgtggtaagattacggtaaaaagagttacttaatgtttgaaagaagtgcaaaggagattgtatatgagcaacgtaaagcgcgtatatgtagaaaaaaaggcagaatttgccgtacaggcaaaagaattgagacatgagatcagaagttatcttggaattgaaactgtgacaggtgtcagagttctgattcgttatgatgtggagaatctttcagaagatacgtttgagaaagcatgtaatgggatttttgcggaaccgccggtagatgtactttatcttgagagctttccggtatctgacaaagatcatgtattttcggtagaatatctgccgggacagtttgatcagagagcagattctgctgaacagtgtgtgcagtttattaaagaggacgagtctcctgtaatcaaaacggcgacaacatatgtcatcgaaggaaacgtaacagaggatgaatttgcagcgatcaagaatcactgtatcaaccctgtggactcaagagagacaggaatggaaaaaccggaaacgttagtgactgtgtttgaggaaccggaagatgtgaaagtatttgatggttttgagacaatgccggaagcagaattaaaagcgctttatgattcccttgggctggcaatgacatttaaagatttccagcatatccagaattattatcacggagaagagcatagaaatccgactatgacagagattcgtgttctggatacatactggtctgatcactgccgtcacacgacattctctacagagttaaaggatgtgacattcggtgaaggagactataaagagccgatcgtcaatacatacaaacagtatttaagtgaccacagtgagatcttcaaaggaagagaagataagtttgtctgcctgatggatcttgcgctgatggcgatgcgtaagctgaaaaaagaaggaaagcttgcagatcaggaagaatcagatgaaatcaatgcatgcagtattgttgttccgatcaaagtagatggagtggaagaagagtggctgatcaattttaaaaatgagacacacaatcacccgacagagattgaaccgtttggtggagcggcaacctgccttggcggtgcaatccgtgatccgttgtcaggacgtacttatgtatatcaggcaatgcgtgtgacaggagctgcagatccgacggtatctgtaaaagagactttaaaaggaaaacttcctcagaaaaaactggtgagaggagctgctcacggatacagttcttacggaaaccagatcggtctggcgacaggactggtaaaagaaatctatcatccggattatgtggcaaaacgtatggagatcggtgcagtgcttggagctgctccaagacgtgcggtgatccgtgagaattcagatccgggagatattatcgtactgctcggcggacgtaccggacgtgacggatgcggtggagcaacaggttcttccaaagtacatacagaagaatctattgagacttgtggcgcagaggttcagaaaggaaatcctccgacagagcgcaagattcagcgcttattccgcagagaagaagtaagtaagctgattaaaaagtgcaacgactttggtgcgggcggtgtttctgttgcgattggagagcttgcagacggacttcgtgtggatctggataaagtaccgaaaaaatatgcaggtctggatggaacagagattgctatttcagaatctcaggagcgaatggcggtagtcgtagatccgaaagatgtggcagaattcatgtcttatgcaaaggaagaaaacttagaagcagtcgaagttgcagtagtgacagaatctccgagactggttttggtgtggagaggaaatgaaattgtcaatatttcccgagcgttccttgacaccaatggagcacatcaggagacaacagtagaagttgagattcctgcaaagaaagacagtctgttcgtaaaagaagaagtgacggatgtaaaagaaaaatggctggagaccttaaaggatttaaatgtatgctctcagaaaggtctggtagagatgttcgacggctccatcggagcaggttccgtgtttatgccgtacggtggtcagtatcagatgacagagacacaggctatggttgcaaaagttccggttatgaatggaacaacagatgcggtttctatgatgagctacggatttgatccatatctgtcaagctggagtccgtatcatggagcgatttatgcagtggtagagtcagttgcgaagatcgtagccgcaggtggagattatagcaagattcgttttacattccaggaatatttccgtcgtatgacagaagatccgaagagatggagtcagccgtttgcagcactcttgggtgcatatgaagcacagcttggattcgggcttccgtctatcggggggaaagacagtatgtctggaacattccaggatattgatgttccgccgactcttgtatcgtttgccgtagacatggcaacagaggatgagattattactccggaactgaaaaagtcaggaaataaactggtttggatgaagattgaaaaagatcagtatgacctcccggtttatacacagctgatggatcagtatggcaaatttgcagcagatatccacagtggaaagattgtttccgcatatgcgctggatcgtcatggtgtaatcgctgcggcaagtaagatggcatttggaaataaactgggtgtgaagatcgagcataatctggatgcgggagaattgtttgcgccggcatttggagatattattgcagaagttccggcagacaaagtgggagaactgagcattgcatacacggtgatcggtgaggttctcgaagagcagaaatttgtttatgcggataccgaaattgctctgacagaagcggaagaagcatggacaggcactctggaaagtgtatttgcgacaaaatcttccgcagataatgatgaagtggtggaagaaaagctctatcatacatctgatattcatatctgcagtcataagatcggacagccgaccgtatttattccggtatttcctggaacaaactgtgagtatgacagccgtaaggcgtttgagagagcaggcgcaaatgtgatcacaaaagtattccgtaatatgaatgcagaggatatccgtgattctgttgccgagtttgaaaaggcaatcggacaggcacagatgatcatgttcccgggtggattcagtgcaggagatgaaccggatggttctgcaaaattctttgcaactgcattccagaatgcaaagatcaaagaagcagtagaaaaactgttgaatgaaagagatggactggcgctcggtatctgcaacggattccaggcactgatcaaactgggactggttccttatggtaagattgtaggacagacagcggattctccaacattgacatataacacgattggacgtcatatttcaaagatggtctacacaaaagttgtgacaaacaaatcaccttggcttgcaggtgcagagctcggaggggtttacacaaatccggcttcccacggagaaggtcgttttgtagcgagtgaagagtggctggatcagttattcgcgaacggtcaggtagcaacacagtactgcgatccgtcaggaaatatcagtatgaacgaagagtggaatgtcaatggctcctaccgtgcgatcgaaggtatcacaagtccggatggaagagtacttggaaagatggcacattccgaacgccgcggtgattctgtagcaatcaatatctacggagagcaggatctgaagatctttgaatccggtgtgaaatattttaaataaaagaatggtttgatttgaaaaacagacttgtattttttgtaacagtctgatacaatctaatttgtaattaatagcaaaggctgttactggtaatgtaggcaagaccgagaacaatgaggagcatgagattattgcacctcttgtcttggtcttttttatgaagaaagtatcaattattccaggttcgtaatccatatgcaattttttttgcaacggcttttggaagatttgctccagaaagaaattacagaagaggaaagggtttatttgattgtacatatttccagaactacacaaaagcaataaaaataaaaaaatgtggaaaaaagtagaaaaatagtattgacaatctaaaaagtcaatagtataatgatcaagcaagttgcggttgagaaaacagcagcttcaaattatggggtcttagctcagctgggagagcatctgccttacaagcagagggtcacaggttcgagccctgtaggccccatagatttaagtgaatatggcggaatagctcagttggctagagcacacggttcatacccgtggtgtcgctggttcaaatccagtttccgctacgaagagagaggtctgaatttcagatctcttttgtttttttgctccaagagttttggataaaaagaataagggagaaagaaaaatgttgatgagtattgcgtgtatactgttgcttggcatgatgatgggatggctttgtaaaaaagtgcatcttccagggctcttaggaatgttggtgacagggatcgtattggggccatatgctttgaatctgatcgatgcttccattttgaatatttcgtctgagcttcgaaagattgcattgatcattattctggcaagagcagggctttcactgaatctggaagacttgaaaaaagtagggagaccggcaattctgatgtgttttgttccggcttgttttgaagttctggggatgattctgctggcaccgaggctgcttggggtttcaattttggatgcagccattatggggactgttgtaggagcagtctcacctgccgtgatcgttccgaaaatgctgaagcttatggaagaaaattacgggacgggaaaaggtattcctcaactgatccttgcgggagcttctgtggatgatgtttttgtaattgtcttatttacagcgttcactggtcttgcacagggggatgcggtatctgtaaaaagctttgtgaacattccggtttccattgcgttggggattgttgtcggaatgactgtcgggtatctgatggcaaagttttttgaaaagatacatatccgggatacgtccaaggtgatgatctttctgtgtgtttcgtttattctggtcacattggaggatcagcttgcggatgtgatcccgtttgcttcattgatcgctgtgatggcagtcggaatcacgcttcagaaaaagcggaaaagagtggcagaacgtttgtctgttaaattcaacaaactgtgggttgtttcagaaattatgctgtttgttcttgtgggagccacagtgaatattaaatatgcgctgtctgcaggatttgcagctgttgttttgatttttggtgtgcttgcattccggatggcgggagtgtttttctgtcttttaaaaaccggtttaaacaggaaggagcggacattctgcatgatcgcatatatgccgaaagcaactgttcaggcggccattggagggattccgcttgccatggggctttcctgtgggaatatcgttctgacagtggcagttgtgtcgattcttattacagctcctctgggcgcgtttctgattgattttacttatcaaaaattgttgagctggtagggtgtatttttggcagaaaagctgatatactagtgaagtaaattgaatgtcagaaataaggagagtgtgagatagagatgaattttcaggaaaaacagcaggaatatgcaagattgatcgtagaaaatggcgcggccatccagaaaggacaggaactggtcctgcgctgccccgcagaatgctgggagtttggccggatgatcgtaaaggccggatatgaggcaggagcaaaagaagtgatcgtacactggggcgatgatgaagttgcacgcttaagatacgagtatgcaccgatggaggtgtttgaaaatgttccgaagtggcgcgcagattccatgaacagctatgcagaaaatggagcggcatttattgcgatcacagcagagaatccaaatgcttttaaaggcgtggacagggaaaaacagatggcagctgcaaaagcgaatgacaaggcgatggagccgtattacaaacggatggtgtcaagccaggtgcagtgggtagtggcagctgttccgggaaaagaatgggcaaagcaagtgtttccggaaaaaagcgaagcacaagccatggaaagtctgtgggaagcgatcttctgcgcagtaaggattcaggatggagatgtagttcaggcatggagagagcatgatgcgctgctttccgaaaaatgtgagattttgaacaagtatcagtttacagagctgcattatgagaatgaggccggaacggatttcagagtaggacttgtgaaaaaccatatctgggaaggcggttccgaggaatccggatcgggagtgcgttttattgcgaatatgccgacagaagaagtatttacaatgccggattacagaaaggcagaaggaaaggtcgtaagctcccggccgctgagttatcgggggaatctgatcaaagacttcagtctgacgttccatgaaggaaaagttgtggattttgacgccagagaaggatacgatgcattaaaacagttgctggatacagatgaaggttccaaaagtcttggagaagtagcgctggtgccgtacgcttctccgatttctgagatggggatcctgttctataataccttgtttgatgagaatgcatcctgccatcttgcattgggagagtgttatccgacaaccgttcaggatggagagaagatgaatgaagaagaattgcatcagatcggcgggaatcattccatcaatcatgtggactttatgattggtacaaaagacatgaagattacaggaattacagaggatggaaaagaaattccagtctttatagacggcagctgggcactataaatgcagaatttgttgcaataatttgaaaaattgcaaaaaatgtgaaaaaagggttgacattccctggtacaggtagtatactaacgaagtcggttgcgggaaacgcatccgacggatatggggtcttagctcagctgggagagcatctgccttacaagcagagggtcacaggttcgagccctgtaggccccataccatgaaagatggcggaatagctcagttggctagagcacacggttcatacccgtggtgtcgctggttcaaatccagtttccgctactgaaaaagaagtccttgaatgagggcttcttttttgttacaatcagagaatgaaaaagaaagccggaatatccggcttacaaggaggcagaagatgaataaaaagtcatggatggtattgcggatcgtggcgggattgtatctggtatttcttggagttcagatcatttcccaggtgaccagggagcagccgaacaatctggcgctgatgatatgtgctgcagttttgtttattggagtgggggttgtatatgcaggtgctgcgatcagcagcgtatggaagatgagcaggggaggagaaaaatctcaggaggatgatcttcagattgtggagaaagaggattcgatggaaacttcacaggaaacacgaagagagattccggatattcagttcaagcaggaaatgccggaacaggaagaaaaagaagagaaagaagctccgattgatacagaagaacaatcggacagccaatagaaaagaaaagcagtcagaaatagaaaggagcagataaatatgagaattggaatgggatatgatgtgcataaattagtagaaggaagaaaactgatccttggcggtgtagagattccctatgaaaaaggactgctcggacattcggatgcggatgtgctgctccatgcgatcatggatgcgcttctgggggcggctgcactgggggatatcgggaagcattttccggatacagatcctgcgtataaagggatttccagcatcagactgttggagcatgttgccgatctcttagaagaacatcagtttctgattgaaaatattgatgcaacgatcattgcacagagaccaaagatgcgtccttatattgatacaatgcgcgaaaatattgccaaagcattaaaaattgaggcggatcagattaatgtcaaggcaacgacagaagagggacttggatttaccggaagcggagaggggatttcctctcaggcaatctgtatgctggaaaaagtgatgaattacagcagtgtggatgtgacagtacagacaggtggatgtgccggctgtcaagggtgcaaaaaagcatagatgggagaacgaggatggaacttcgaagactggaagaacaggagcaccaaaagacccggaagctgtgggaggaagtgttttcagacgataccagggcatttctggattattactattttatcaagacaaaggagaatgaaatctgggtgattgaagaagacggagagatccagtccatgctccagctgaatccttatcagcttcaggtggcagagcatccgtttttatgccgttatattattgcagtggccacaagagcacaatacagaagccggggttatatgagcagtcttctgcgaaaagcgatgcaggagatgtatgggaaaaaagagccgtttacatttttgatgccggcagcagaggcaatctatactccatatgattttaggtttgtatacagccagaggcaggcggtgtttgaaaaaaaggcagagacagaattgatcgaagaggaagatgcaacaatgtttcaggcagaagaactggcagcgtttgcaaaggagcggctctttggaacggctcgggtatatgcagtgagagacgcgcattactatcagacacgcgtattggagcagcagagtgaaaacggcggaatccgaatgctgaaaaaagatggaaagctggtggggatctactgctatgcaaaagaggaaacctgcgaagttttagaaccgctgatccttccgggatatgagactgtattttgggattccatatccggtttgagtgagaatccggtcaaagtactggcgtgtccggaagtgttggagccttgtgcaaggtctgtggagaggaaaccgatgatcatggtacggattctgcatcttgagaccttgttatcagtgcttacggtcaaagagggagaaaatctttcttgttcctttgcggtcattgatccgatcttgactggaaacagcaggatctggaagctgtgcagtcaggaagatggcaggatacaggtcacagagacagaggattctcagggagtgctgacaatcggtgcgcttacggaacttgtatttggctatcgaagtgcggcggatctaagaaaggatccggacgtatgtcttggcagagagctggagtgtgagctggagaaaatttcaccgctctctccggtattcttgaatgagattgtgtgaaagaagttgacaaaacagaaaattttgcataagatataatctggactaagaaataaaagcaaaggcttagaacgaaaagagtatctggtcatacgctcacagagaggaattgtcactggctgaaagcaattccgggaaagcggccaaagaagtgcattcgggagctgattctgcgaacacacaaagagtgtcagtagcagggtacgtgtcgcatacgttacgtgcaatgagtgaaagaaccagattcttttaatagagtggaaccgcggaagaacttcgtctctaagttgtagagatgaagtttttttgttttaaaatggcagaaaagtcaggaggatgtcatatgggaatgctgtcttatatccgggaagaaatccgggtggtgaaagaacgtgacccggcgatcaaatcgagtatggaagtgctgttatatcccagttttaaggtgatcttgcgatatcgggtagcgcataaattatatctgaaaaagcattattttctggccagatggatttcccagcgtgcagccagaaaaacgggaatcgagatccatccgggcgcacagatcgggaaagggctgtttattgatcacggaagcggagtgattatcggtgagaccacagtgatcggagataacgtgactttgtatcagggggtgactcttggcggtaccgggaaagagcagggaaagcggcatcctacattggaggataatgtcatggtcagtgcaggcgcaaagatattgggttcttttacaatcggagagaattcaaaaatcggagccggttcggttgtgctggaagaggtgccaccgaattgtaccgtagtgggagttccgggaagaatcgtaaagagagatgacaaaaaggtgcttcgaagtgaaatggatcaaatcaaccttccggatccggtgctcagtgatatcagagaacttcagaaagagagcagagagcttcacgatcagctgacggagatggtacagaaaatgagatgtatgaaacaatgtaaaacagaacagacgggagaggagaaaaaagatgaaactgtataatacaatgtcaaaaacaaaggaagagttcgttccattggaagaaggaaaagtaaagatgtatgtctgcggacctactgtttacaacttcatccatatcggaaatgcaagaccgatgatcgtgtttgatacggtcagaagatattttgaatataaaggatacgatgtgaattttgtatccaactttacagacgtagatgataagatcatcaaaaaagccaacgaggaaggtgtgacagcagaagagatttccaaacgctatattgaagagtgcaaaaaagatatggaagggatgaatgtcaagcctgccaccaaaaatcctctggcaacagaagaaatcggcggcatgatcgatatgatccagacgctgatcgacaagggctatgcttatgaaaagaatggaacagtttattaccgtaccagaaaatttgaagggtatggaaagctgtcacataaaaatctggacgatctgcagtccggcggacgttcccttctcgtgacgggagaagatgaaaaagaggattctctggactttgtactctggaaaccgaaaaaagagggagaacctgcatgggagtcaccatggagtgaagggcgtcctggatggcacatcgagtgctcggaaatgtccaaaaagtatttgggagagcagattgacattcatgccggtggagaggatttgatcttcccgcatcacgaaaatgagattgcacagagtgaggctgccaacggaaaagatttttccaaatactggctgcacaacggctttttgaatattgataaccgcaaaatgtccaaatctcttgggaacttctttactgtacgtgagatcggagaaaaatatgatcttcaggtactgcgtttctttatgctgagtgcgcactacagaagtccgctgaacttcagtgcagaattgatggaggcagcaaagaacggtctggagcgtatcgtgacagcagcagaacatttgaaattcctgctcgaaggcgcaaaaacagagaatatgacagaaaaagagcaggcaaagattgtaaaaagtcaggaatttacccggaaattcgaaaaagccatggatgatgatttcaatacagcagatgcaatcgcggcagtgtttgacttggtgaaatttatcaacacaaatacagacggggaaagctctaaagaatatctgcaaaacctgttgagccagctggtcgcattgacagatgtacttggaattatcgtagaaaaagagcaggagatgctggcagacgatatcgaggcgctgattgcagagcgtcaggctgcaagaaaagaaagaaattttgccagggcagatgaaatccgtgacgagctgcttgcaaaaggaatcattctggaagatacaagagaaggggtaaaatggaaaagagcgtaaattttgaatttagagatctgatggaagagatgctgcagtttgaaccggtggatgtatctgcatattctccgcttgtgctggcttatattggagattgtgtatatgatctgatcatcaagagcatggtgatcaatcagggaaaccgtcaggttcagaagcttcacagagagaccagcgggtatgtgcaggcatctgcgcagtcatttatgatgcgtgccatgcaggaacatctgacagaagaagaacatgctgtctataaaagagggcggaatgcaaaatccatatcccctgctaaaaaccagtctattacagattatcgaagagcaacgggatttgaggcactggtcggatatttgtatttgaaaaagcaatatgagaggttactgacgcttataaaaatcggactggaaagtctgaaagaaaatcagggagaagaagatgcaggaaaataggaaagaatttgataatacagagcatacccttgtgattgaggggagaaatgcagtgctcgaagcgtttcgttcgggaaagccgatcgataaagtatttgtgctggacggatgtcaggacggaccggtgcgcaccattgtaagagaagcgaaaaagcatgatacgatcatcaattttgtgggaaaagagcggctttcacagatttccgtgaccggaaaacatcagggtgtaatcgcatatgcggctgcctatgaatattcggaagtggaggatatgttaaaactggcagaagaacgaggggaagatccgtttttgattctgcttgataatatcgaagatcctcacaatctgggtgcaatcattcgaactgcaaatctggcaggggcacacggtgtgatcattcccaagagaagagcagtgggactgactgcgaccgtggcaaaaacttctgcaggagccttaaactatactccggtcgcaaaagtcacaaatctggcaaagacaatggaagaattgaaagaaaaagggctctggttcgtgtgtgcggatatgggcggagaatccatgtatcgtttgaacctgaaaggaccgattggtctggtgatcggaaatgaaggggaaggcgtgggacgtctggtgaaagaaaaatgtgactttgttgccagcattccgatgaaaggtgagattgattctctgaatgcatcggttgcggcaggagtacttgcttacgagattgtacgtcagagaacgatgtaaggataaaatggaggaaatgatgcagagaaaccggtatgaaatgctgacagatgaaaaattgatcgaagagctgcgcggcggggactctgcgatcacagattttatcatgaataaatacaagcccatggttcgaaagaaagcaagagccatgtttcttctcggcggagagaatgaagatctcatccaggaagggatgatcgggctttttaaagcaatccgtgattatgagaccaggcagggaacatcctttgcaagctttgccgaactgtgtgtctcaaggcagatgtacagtgcgatcgaggcatctcagagaaagaagcaccttccgctgaattcgtatgtttcattgtacgaagaatccgtggaggagggaaagaaggttcctctgatcgataccattgaaccacaggaggaaaataatccggaagcattgtattttggaaaagagtttaccgagattttttcagaacggctgaaggagaatttaagtacgctggagaatcatgtgctggaattgcacctgatgggaacggattacaggaaaatcgcagagcttctcggaaaaagccccaaggcggtggataatgctctgcagaggattaagagcaaggcacagaaattgctgaaaaatgaattgagataaaaagaagatgaattttatgaagcaatgcttgattctattaggcatggtggattcatgaagatggaataaaaggtgaaaatttatcaaaattatataaaaaatattgacagagcttacctaattgatgtataatattagtgttgtgtttatcacataagctgctatggcgcagtcggtagcgcgtcgccttggtaaggcggaggtcgggggttcaagtccccttggcagcttgatgaaaatagcgtgccgtcaaagagttccagacattctttggcggcacgctgtttttgtgaaaacagaaatttttgcctgtttatacaaaaagaaaaagccgggatatcatcgccggctgaaaaaagggggaaaagtatatatgaaaaagctttttgctttgtatgcatataatataggcgaaaagtgtgagtaaactgtgatagttctataaaaaagaaatgaaaaattaaaaagaaaataaaaactgcggcaatatctctgatcagacagatactgccgcaatttttatgaattttcttcctcttcttctaccagctttaaaatatcagttaaatcgcatttcaaatattcgcacagtctggcgagaattttcagatcaattctggatatcttattcttacagtagttgtttaattgggttcgttgtaaattgcagtttttgcagacggaatttttgctgattcctttttctttcattactacgtccaaatcaatgattatcttattcatatctacacctgcctttcctaaagtatatgtgcagttgtataaaaatataagatgcaatataatatagatgtagaaatatacacctgtataaaaattataatggagaatgaacgtgaaaaagaaaagagatttcaagtatatcataatcataggagttctggcagcgacggggtggttccttttccagcagaaaccggacgtgcggtctactacagtcactcatacagatggagagtacaggctttgggtagaggtgaatgcgaacagatggacgatagaaaacagagagcagtttgcagaaaagttgttgaaaatggtggatgaaaatacatttcaaaaggtgcatttcagtgaagatctggaagagccgcactgtattattttccgggtatatctcatgccgtatcattcgaactgggcatttgaggtgtgctgcggcaagcagaaaaaagacacgcatcgttgggagatacgtgtccgcgagaatcatttataatgtttcagaatctaaaataatcgtaaatggtccgtcattaacaagtgcaaccttcatatctgcaccaaattcgccggtttccacgcaggaaacagacaggcggcattttgtgatgatatattcatagagggcattggctttgtcaggagcacctgcttcgataaagcttggacggttgccctttttgcagttggcatacagtgtgaactgagaaaccagaagaaggctcccgtttacatctgcaagagaaaggttggtttttccgttttcatcctcgaaaatgcgcagaccgatcatttttttgatcagtttgtcagcagtttcctgtgtgtctgaatcagaaactccgatcaataccagaaatcctttctggatttttccgatggtctgatcttccacagttacggaagcttctgatactctttggataataaatctcatctctagaatctcctgtctgttttatttgataatccggatctctccgattttgtggatttcttttttgggcgcgtctgccggatatcccagagcagccattccgtacacgacatgatcggaaggaatttcaaactcatcaaggagagcacggacttcagggtcatcacagagtgtgcggagctgattgatccagacagaaccgattccgaaggaatgtgcagccagaaagatgttttccagggcacatgcattgtcttccataccgtgtggattttctttttggttggaagggatgataagaacctgtggacggtacatatcatagccctttcgtccaagttttcgtccgatgagttctgccagctgctggattttttcctgattgcagagaaccgtaaacttccaggtctgcttgcccataccgcttggggcatagatggcagcctgcaggatctcgtttaattcattatccggaatttctctttgtaaaaatgcgcgggtacttctgcgggtaagcagattttctatgattgcattcatattcaatacctcctgaaataaaatactttgattcttattgtatacttgtgttccgggaaagtccagagaaacaggttacagaaaggaatcttttgatcggaaacagatagtaacaaaacgtgtcgaaaaagatcgggaaaatggaaaacgcagaaaagattccatacggaagtatggtatacttaatgatagtgaaagtggcgttttcatacagaccaggaggggacgaaggatgaagaaaaatctggagccactgaaagatgcactggaagagttggcagattttgcacgcaaaatggagccaacagaatatgcctacttctacaggctgatggagcgcatggagaacaatgtggaaatctgtattttagtgagagatgacagattggaaaaactggaagcaattctgagacgggactggaatctggtgaagcggatgtatggtgatatgtggaaaatggatttacagaatgagaaagagaggtatcgatttttacagctgctgacagagattgaatggtatctggagggaaaaggcctgatgcgtatggaagaaaaaaaggtatggttatgcgaattgagagagcggcagatgcgaccgaaagggtggtgatctgccgcactttctgcgtgttgcgtcttaaaaacgaatttggtatgataaatagcaggaatacgggagcaaaggagatattatggacagaacgatttatgataattatgtaaaaatcttaagaaaagaactggttccggcactggggtgcacagagccgatcgctttggcctatgcatcggcaaaagcaagggaagtgctgggagagtttccggagcatatgacagtctggtgcagcgggaatatcatcaagaatgtaaaaggtgtgaaggttcctaattccggtgggatgaagggtgtggaagctgcagcagtactggggcttgcaggcggtgatccttctcaggcgctggaagtgttagaagccgtgacccagacagacatcaaaagaacgaaggaattgcttcgggaatcattttgcgactgctgtttaaaagaaggtgtggcaaatctgtatatcgaagttcaggttgtaaacggagaaaatgaagcgacagtcatcattgagcaggagcataccaatattacaaggatcgagaaaaacggaaaaattgtgtatgcgcacaagaaagaagtgtcaggggaagaaattgaggtggataaaagtctgttgaatctggcagatatccttgtgtttgcgcaggaagtggatttaaatgaggtacgagatgtgcttgcccggcagatcaggtacaattccagaattgcaaaggaaggtctggagcatgaatggggtgcccaggttgggcgggtgatcgcagaggaattcgggacgactgtacagtggaaggccgttgcttcggcagcggcaggatcggatgccagaatgagcggatgctccctgccggtcattattaattctggttccggtaatcaggggatgacctgttctctgccggtgatcgaatacggaaaagagctgaaaaagagtgaagaagagatttatcgtgcactgtgtgtatcgaatctggtagcactgaatcagaagcgttatatcggttccctttcggcctattgcggcgcagtttgtgcggcagcaggcgcaggagcagggattacgtatctgtgcggcggaaatctggaacaaatccagaatacggtcgtcaatacgatcgcggatgcaggcgggatcgtatgtgacggtgcgaagccaagctgtgccgcgaaaattgcaacatctctgcaggctgcaatcttaagtcacaagatggcaatgcgcggactggtgtttagcagtggagaggggcttgtcatggactgcccggaagatacgatcaaggcagtcggatatgttggaagagcgggaatgaagcagacagatgtagaaatcctgaatcttatgatcggaaagacaaaaatagaagatatcgaaaaataagagaaagatcagcctcatgtaaaaaggggctgatttttgtaagtaaaagaaaaacagatgaaacttttcaaaaggaaatccggtctaatgagtgtaaagcagttcaaaacagcaggaaagcggggtgagaggtgatgaaatatctggtaaaaaaggcacagaagaaagacgatcaggcatttgtggagctgatggagcgctgtaagagcgggatgtataaagtggcaagaagttatttaaaggatgatgcagatattgcggatgcgatccaggagacggtgatcaattgctatgaacacatcgggcgcctgaaaaatgcagattattttaagacatggctgaccaggatcttgattaataactgcaaggatatactggcagcaggaaagcgggtgtatcctctggagcagattgaagaacaggagaatacgtgtatggagatgcagaattatgaatttcaggaattgatgaactctctggatgaaaaataccggatcgtgcttcttttgtattacggagagggatttaagatcaaagagatcgcacaaatactggagatggacgagaatacggtgaaaacaaggctgtccagaggacgaaagaaatttgagcatgcgtattccatgtgttaaagaaggaggcagtgaaatgaagaaagactattctgtagatgagatgaaaaaaattatgggacaggatatggaggttccgaaatctgtggatgagggaatgaaaaaagcgtatgaacagcttgggattcagaccacgagaagacacaacagaaaatataaactttggacaggtctggcagcggcagcagtactgacggcagggctttccatcacggtgtttgcggtgacaaaatatctcaatgtaacgcgaagtgaggagggggacacactccagtatcagattgaagtggatacaaagcagaaagaggcgcatcagatcaaggtggagccgacctatatgccggatgggtatgaatatcaggaagaaggtccatatggcggaaagtggcataataaagagaccaacagtgggatttccatcataccgtataatgcggcagagctttacaagatgtccagagtggatgaagattcttttcggaaattccgtaaggaaagccgggtaaagacatcagatacagagaataccaaactggatctgtttttgatggactcggaatatgtggacagtgagaagacagagaaaatgttatatcttttcaatgaagaagagggatatggaatttatatccacaatacgagcgatcttccacaggaagagattgaaaaagtggcagaagggttgaaggttaccgttctggatgagactgtaccatatccttcggaggaagagatccaggcggaaatcgaagaaaagaaatggctggaagaaatggaagcgcaggcgggaaatacgattccggcagaaggcgtgcgttcaatcggtgaggagatcaaaaatccgttcagagatgagaattcaacagagtttgaagatatccggtttacggtcaaggatatcaaaattcaggatacgctgccggtcgatcagtttccaagagaaaactatgcccagtatgaagatgaggttgctctgtgggtgaatgaagactcctctctgaaaccgcatgagagatatgtgctcgatgcaggagaatggggtacaacggatgcaatggcaaacaaagaggcagaaacggtcaattccaagtatgtagttgtaaagatgcaggcagagaattgttctgatttccagacagagtggaatgcaagcgggggaatcagcatcgctccggatctggcatacatgaagaccaatgaggacggaagcctgtcaagggcagattatcagctggtgggagcgaatgaaaattataacctgcagtggaaagccggaaacggggcatctttcccgatttattttgacaagatctactatacagaaggcgtgcagagaatgaaagatgcattcttccggccgctggcagcaggagaaacactggaatatacactggtttatgtggcggatgaggatcagctggattccttatatctggatatatatccgggatatggaaacacagaggaaggtgtagccgctccatatgtaaaagtaaaataagtggtttagatttctttacagaaaatggaaaaacgcctatactgttaggaaaagaaggattcggacaggaggcaaaaacagatggcggcgtttttaaaagaaattgaaaaattttacgggacaaaagagaaaaaccggcagggtgaggatctggagacgtttctggagcattatgatccccgcaaatatgagacaccgagctgtaccacagatgcggtaatcttttctataacaggagagcttctggaggtgaatcagctgaaagtgcttctggtgcgaaggagcaatcatccaagcatcgggttctgggcgctgcccggcgggtttgccgaaatgagggaaaatctggaggatacagcaagacgggaactggaagaagagacaggagtaaaagatcttccattggaacagtttgcagtatatggagattatgacagagatccgaggacccgtgtgatcacaacggcatatctgtcgcttgtgaacgagcaggacatcacggtacgggcaggggatgatgcggcggacgcggcatggtgcagcctctgcctgaaagaaaaggaagtccacacaggagaagtcagcagaaaagtctggcagcttcatgtgtcaaatgaagagaaggggctggatacccgggcggaagttgaagagacatgcagggaagggctgattcgggagcgaaagtttcaggtgctcacaggcggagagattgcagtagatcacgcggcgatcattgtacaggcaatgtgtattctggcagaccgccttttagaaaagagataaaaagacaaaaaagtactggtatcggcagtgtgaaaaagtacctgccgataccagttttttatgattttttctgttttttccggctgctggaaatatatgcgataaatccaagacaacccagtgcgatcagcatccagatcacaaaggtgagagtaccctgtggatggaacatgtcgtagtatcctttcagatagatgaccacaacgatccatggcaggatatgggtcatgtagaagcggacttttgtcggaaacttcagcccgttgccgctgttggcctcctgtatgaaatgtttccatccccatccgtttttatgggtacagaacagaaggtatacaacagaacccagaggaagaatattgttggagacaataaagtcttccagatccatgatatttgttccgggacccagaggctggaatccggaccacacgctgaatccgagaatgcaggggatgcttaagacggtgatcagaacaatattgatccccaccgctttcgtccgtttccatccgaacagatccatccagaaagaaacaatattttcgaagactcccacgatagtggacagcgccgcacagaataagaacaggaagaataaagagccccagatccgtcctccggccatctgtgtgaaaatgttcggcagcgtgatgaatacaagtcccggtccggcatctggttccaccccaaatgcgaagcaggaagggatcacgatcagtcctgccatcaacgccacacaggtgtccagaagtacgatgctgacagattctccggcaagggagcgttttttgtccagatagcttccgaagatcgccatgcctcccattccgatgctcaaggtgaaaaatgcctggctcatggctccgaagatcacgtttccgattccgttttccaccatgcggttaaaatccggaaccaggaagaagcgaagtccttccgaagagccggaaagcgtcacagaacggatcgtcaggatgaccatgatcgccagaagacagagcatggtcactttcatgatcttttccacacccttttgcagaccgatgctgcagatgccaaaggacagtaggatgaccagtaccgtccagaaggacagtgtaggaacggaagaaagcatgcctgcatatttttcggaaacttcagaagcggttacccctgtaaattctccttttgccatgcggaagcagtagtagagcatccatcctccgaccatggaataaaacatgaccagaagatagtttccggcgatggctgcccagcgtgcataatgccatttggtacggggcggctccagtgcgttgtaagaagtagcgatactcttctggctggctcttcctacactgaattcacatacgatgatcggaagtcccaaaatgaccagaaacagcaggtagactaaaataaaggctgctccgccgtattttccggccatatatggaaacttccagacgttcccaagtccgatggcacatcccgcagataccagaataaagcccagacgggaaccaaattgttctcgtttcataataacctccataaacatacgatattttctcccctgaaaggagttttctttagaagcttcatcagtatatcacgttggcgcggcaaagtaaagaaaatgttcagcatgtaccttgtccaaatggtggatttatgataagataatcggaagaatgtttgtacacgaggaggaatttatggaaaacgaagcagtttcaaaaaatttcattgaacaggaaatagacaaagaccttgcagaaggcgtttacgatcatgtgtgcacccgtttcccgccggagccgaacggatatctgcacatcggacatgccaagtccattcttttgaactacggactggcaaaaaaatacaacggaactttccatatgcgttttgacgataccaacccgaccaaagaaaaagtggagtttgtggattcgatcaaagaagatatccagtggctgggggctgactgggaggatcatctttactttgcatccgattattttgagcagatgtacgaatgcgcagtaaaactgatcaaaaaaggaaaggcatatgtgtgtgacctgactccggaagagatcagagagtacagagggacactgacagagcctggaaagaacagtccgtacagagaacgctccgttgaggaaaacctggagttgttcgaggcaatgaaagacggaaaattcaaggatggagagaaggtgctgcgcgcaaagattgatatggcatctccgaatatcaatatgagagacccgatcatttaccgtgtggcacatatgacgcatcacaatacaggagacaagtggtgtatttatccgatgtacgattttgcacatccgatcgaggatgcaattgagcatatcacacattcaatctgtacactggagtttgaagatcaccgtccgctgtatgactgggtagtcagagagtgtgagtttgagatgccgccaagacagattgagttttctaaattatacctgaccaatgttgtgaccggaaagcgttacatcaaaaaactggtagaagacggtgtggtagacggatgggatgatccgcgcctggtttccatcgcagcacttcgccgcagaggatttacaccggagtccatcaagatgtttatcgatatgtgcggagtatcaaaaagccagagctctgtagactatgcgatgctggagtactgtatccgtgaggacttaaagctgaaaaaaccgcgtatgatggcagtactggatccgatcaagctggtcattgacaattatccggaagatcaggtggaatatctggatgtgatcaacaatctggagaatgaggagcttggtatgagaaagattccgttctgcagagagctgtatatcaacagagatgattttatggaagaaccgccgaagaaatatttccgtctcttcccgggcaatgaggtacgtctgatgcaggcatattttgtaacctgtaccggatttgaaaaggatgaagacggcaacatcacagtggtacactgtacgtatgatccacagacgaagagcggaagcggatttaccggaagaaaagtcaaaggaacgatccactgggtaccggcaccgtatgcagtaaaagcggaagtgcgcctgtacgagaatctgatcgatgaagaaaaaggcgtttataatgaggatggttccatgaacttgaatccgaactccctgacagtcttaaaagactgctatgtagaaccgaattttgaggatgcaaaagcatatgacagcttccagtttgtaagacagggatatttctgtatcgatgcaaaagattccagagaggatgcactggtatttaaccggatcgtgtcactgaagagttcgtttaaactgccgaaataagcagcgtgaaattatgaatgaattgactataaatcttcacacagcatctgagacaccgctgtatgagcagatttatcagcatattaaaagagagattcaggagggaaggattaccagcggggaaaaacttccctccagtcgttctctgtgcaaatatctggaagtcagcagaagcacagtggagcttgcctatgaacagctgatctcggaagggtatgtggaagcagtaccgtgtaaagggtatttcgcggcagaactggaagggatgtatcgtctggatgtcgttcctgctttggtgggagcagaagaaaagacagagaaaaaagagtggaaatatgattttacaccgaacggagttgatctgaacagtttcccgtataatgtctggcgaagacttgcgaaggacagtctgttagatgaccgggcagagatgttccgtctgggagattctcagggggagtacggactgcgaagtgcgatcagcagatatttgtatcaggcacggggagtgaatgcacatccggatcagatcattatcggagcaggaaatgactatcttctgatgctgctttccacagtgatcggccagaatcataaagtagcgctggaaaacccgacctacaagcaggcataccggctttttaaaagtctgtcttatgatgtatgtacagtggatatggatgagaaaggaatgaaagtggccaatctgaaaagttctggagcagatattgcgttcgtgatgccttcccatcagtatccgctgggaatcgtaatgcccatgaaacgcaggatggaactgcttaagtgggcagccaaagaccctgcacgctatattatcgaggatgactatgacagtgagtttcgatacaaagggaagcctattcccgcgctgcaggggtatgaccgatgggaaaaggtgatctatatcggaacgttttcaaagtccatcgcgccctcgatccgtgtcagttatatggtgcttcctgtgccgcttttaaaggagtttcagaaaaagagcagttttttaagttctacggtttccagggtggatcagctgattttacagaagttcatcgaggacggacattatgaaaggcatctgaaccggatccggacattgtataagagccgtcatgatacgttgatgggctgtttgaaaacatttcagaaaatctgtacgatatcgggggagaatgccggagtacatatactgctgcattttgtcggtgatatgacagaagaagaattgattcgaaaagctgcggaaaaaggcgttcgagtatatggactttcgcaatattatatcgatcctcctgacgggctaaaaccgacgatcatgctgggatatgccaatatcagtgaagctaagatgaaagaagcagtaaaattgctggaagaagcatggaagtgagaatattcatccggataaccagcagcacatgtctgcggcggacggactttgttcgataaagtaaaaacaggaactgttcaaaagtggccagttcctgttttgcattattcttccgattcagtatcagttgtttgtgtttcttgggaaggttctttttctgtatcagcagtatcggatgctgctttattcagatgcacatatccgcgctctgataccggctttaaatcattgtccagatcaaaatcctcttcttccatatcttctgtacaatcatactcggaaactgcgtcactgtctttgcagaaataagcaatgatcagaccgatcccagtaccgacagccgcaaggccaagaagccatttcaaaaactttttcatcgtaaaaatctcctttccagcagatgttatgaatcgatatccattgtaatacttttcgccgttaattacaagacctttgagagttactgttcacagtaacttttgagaagttgtattgtggagaaatacaaagtgtgctacactggggatattgaaaaaagcaggggtgaaacaaaaagatggaacataaagcagtgaaaaaagcgaagaaagggttgttcagcattgtttttggccgtacagcactgatccttatgcttgttctgatccaactgatcattctggttggagtggcaacgatactgaatgactatgccgtctatgtgtacggcggatttacagttctggcagcagtgattgtaatttatattatcaatgaaagaggaaatccggcatttaatatgacctgggtacttatgatcctgatttttccggcatttggatgccttttctatatttgggtaaagtctcagcttggaacaagatatatcggaaagcgattgtgtatgctccggcttgatacagcaaaatatatgcagcaggagcctcgggtgattgaagctttgcgtgagagcaagccggccaatgcaaaccttgcgcattatatgcagtatcagctgaattttcctacttatcggaatacacaagtgcaatattttgcatgtggagaagaaaaatttccggtgcttctggaagaattgaagaaggcggaaaaatttatctttctggagtattttattgtagaagaaggatatatgtgggggtctgtgctggaaatattaaaagaaaaagcagccgcgggcgtagaggtacggtttatgtatgacggaatgtgcagcatttctctgcttccgcccgattatccgaaaaaaatccgtcggttcgggattcagtgtaagatgttcagtccaatccggccggtactttcgacgacacaaaataaccgggatcacagaaaaatctgtgtgatcgacggaaaaacaggatttacgggaggtatcaatctgggagatgaatatatcaaccggaaagaacggttcgggtactggaaagatactgccgtcatgatcaagggggatgcggtgcagagtctgaccatgctgtttttgcagatgtggaatgtttcagaattaaaaaaagagaaatttgagccctatctgactacgatggcaaaggagttgaaaccggagaccggatttgtgctcccctacggggacagcccgtacgatcatgaaaacgtaggggaggaagtgtatgtacatattttgaatcatgcgaaaaaatatgtgcatattatgacgccgtatctgattttggacaacggcatgctggatacactgacaagagcagcaaagagcggaattgaagtctgcattatcatgccgcatattccggataaatggtatgcgtttgcggtggcgaagacatactatcgggaattgatcgaagcaggcgttaatatttatgaatttacaccgggatttgtacatgcaaaggtatttgtctcagatgatgatacggcaacagtaggaactgtgaacctggattaccggagtctgtatctgcattttgaatgtgggatctttgtgtatgacaatccggtggtacataaaattgaaaaagattttcaggaaacactgaaaaagagctgtaaagttacagcgtcagatatcggaaataccggtatttttatgcggatctgcggaagagtgctgcgtctgatcgcacctctgatgtagaaaaaagaaaaagtgttttacagaatgagaaaagtatagtataattcatagggcagtgattcataagaactgctaattaagagttaaaagcgatgaatacgcaggaggatttgagatggtaaaagcagtagtaggagctaactggggcgatgaaggaaagggcaagattacagatatgctcggaaaagaagccgatatcattgtccgttttcagggtggagcgaatgcaggacataccattgtaaatgattatggaaaatttgcgctgcacactttgccgtcaggagtattctatgaccatacgaccagcattatcggaaacggtgtggcgctggatattccgagattgttcggagaggtgcagcagattgtaaaacagggcgtaccgcagccaaaacttcttgtttctgacagagcacagatcgtgatgtcttatcacaagaattttgatgcttacgaggaagagcgtcttggaggcaagtcttttggttctacaaaatcaggaattgcgccgttttattccgataaatatgcaaagatcggattccaggtgagcgaattatttgatgacgagcttctgaaagaaaaagtggttcgcgttgcagagcagaagaatgtgattctggagcacttataccataaaccgttgatcaatcctgacgacttatataaagaactgacagagtacagagacatggtagcaccatttgtatgtgatgtttctctgtatctgcacaatgcaatcaaagaaggcaaagagattcttctggaaggacagctcggttctctgaaagatccggatcacggaatttatccgatggtaacatcttcttccacactggcggcatacggtgcgatcggagcgggaatccctccgtatgagatcaaacagatcattacagtatgcaaggcatactccagtgcagtaggagcaggtgcatttgtcagcgagattttcggcgaggaagctgatgagctgagacgccgcggaggagacggcggtgaattcggagcgacaacaggacgtccgagacgtatgggatggtttgactgtgttgcttccaagtacggatgcaggatgcagggtacgacagatgtagcgtttacagttctggatgtacttggatacctggatgagattccggtatgtgtaggctatgagatcaatggagaagtgacaacagagttccctgtaacacatctcctggaaaaagcaaaaccggtattgaagatacttccgggatggaaatgtgatatccgcggaatcaagacatacgaagaactgccggagaactgcagaaagtatattgaatttattgaagaacagattggatatccgatcacaatggtcagcaacggaccgggaagagacgatatcatttatcgcaaaagataaaaggtgaacgaaggtgttccgtatctgccagcaaaagctggcagcggagcatctttttttgtgaaaaaaatgttaagagatttttatgaaaaactttagaaatcagccacatcggcgtcacaatttgacagtaggataaaagagtgtcagggggacaaaaaaagttctgtcaagcaggcagaaaaatgacatatttcagagggcagtatcataaaataataaggctgaggccggaaaaaggaggtattttatgcgtcagaatagtatacagaacagattacagatgatatcgatggaagaatacctggagaaaagacagaaaattcgagagaccgaaagaaaaagagacaaaaaaacagtctgcaggcagcaggaactggatgctgccgttgcgatggcagagctgtatgtttaacagaagaacattactcgttcgagtcggagtcatccgtatgagatgtacgggaaaagagtgtatagatatataacagtacaggcagcaggatcgtggcggcaatggcagccatcagaagcttctgagagacaacgctgtctataaaagcaaagatgagtgtgctgacgtaaagaagaaccagcaggattgctccgattagtgccatgatacgttttgatttcttcatattagattcctttcttttatctttttataaatctgccggagcatctttttgctccggcagatttattatataaaaaagatagaaagattgcaatacagcggtaaaattagtagtttactgacagagaaaagtgttatataatagaaccacgattgaatttctaagaaaaaggagtttttacaatgagtgaaaaatgtttattagatcaatggagagatatggcatatgacagagaactgtccaaagagcagttagagaagttctggggtcgttatttcagcattgaaagaggaatttatgagcagcttttgacagagcctgatgtagaagtgaaaggtacggtcaaagagctggctgaaaaatatggacaggaagttctgacaatggtaggatttctggatggaatcaacgacagtctgaaagtgccgaatccgattgagacgatgacagaggatacggaagtgaatctgatctttgacaaagagctgttatacaaaaatatgatcgatgcaaaagcagactggttatatgaactgccacagtggaatgctatttttgatgaagaaaagaaaaaacagttgtaccgtgagcagaaacagtccggtacgatccgcaaaggaaagaaaatcggaagaaatgatccatgtccatgcggaagtggtaaaaaatataaaatgtgctgtggaagaaatgcatagcagtatatcgtatgagagggagctcggatgagtctcccttttatgtttcggaaaaagaacgggagatgagcatggaaatttatttgatcacggcaggggcgctgtttctcttttattatggaatcctctgtttctataccggaaaatggaactctacgtttgccagattctggctggtggcggggattggacactttttgatgattcctgcgacaaaagaagaagtgacgcgaaagcttttgttcttctgtgtggcgggaatatggatcctttttcttgcggtggagttttttattgtacgtgccatgaggcctggaagaaagaagaactgccggtatctgatcgtgcttggtgcgcaggtccggggagagcggatcacagattcattaaagagaagactggatgctgctttattgtatcatcaggtctgtgcttcggtgaagatcatcgtatccggcggtcagggaaaaggtgaggatgtttcagaggcttatgcgatggcacaatatttgcgggaacatggggtaaaagacgagcagatcatgttggaggatcagtcgcggacgacgagggaaaacctgcggtttagcaaagcttatctggaggagttgaaaacaccggttggaattgtgacaaataattttcacttgtttcgggcacttttgatcggacgaagtgaagggtatgagaacctgacgggaattgcggcaggatgtaaccggattttgtttttgaactatatggtacgggagttttttgcggctgtgtggctgtggattcagagagtaaaaaagaaatctggttgacaaaacaaaaagtgatgttataatgaggattaggttgagaatataatatttcaatacaatgacgagacgagtaggatgtggaagaagacagagaagggagtcgcaggctggaagctcccgcttacggaaacatttgaaaactacctctgagtggctgaaaacagcccggtgatcccgttatcatcacaaatgagtggtttcggtatttaataccggttcaaacagggtggaaccgcgagtatgatctcgcccctttttgcaggatatgcaaaaaggggcgttttttaattttgaggtctcgtggttgtgcagtaagagaaaggagccagaaagatggagtgtaattcgaattatcgtattttgaataaccaggtcaagattccgtgtgctgcatttggaacttataaagccgcagaaggaaacagcgcggatatcatcggtactgcaattcgtgccggatacaggcattttgatacggcttctgtttacggcacggagaaatatgtggcagaggctattgaaaagagcaggattccaaggcaggaattttttctgacatccaaggtctggaaagaggatatgggatatgaacagacaaaggctgcatttgcgaaaaccttagagcagcttaacacagattatctggatttgtatctgatccactggccacggcccacgttggactgcaaaaactggaaggaactggatttagagagctggagagcaatggaagaattgtatcatgcaggaaagatccgcgccattggggtgagcaattttctgccgcaccacattgagaacctgatgcagaatgcaaaggtgactccggcggtcgatcagttggaatatcatcctggatatacacaacaggcagcagtagactattgcagaaagaaccagattcttgtggaggcatggagtccgatcggacgaagacgggtgtttgaagagccgctgattcttgagttgtctgagaagtatcatgtatcaccggcacagatctgtctgcggtttgcattgcagaatggcgtgataccaatgccgaaatcctcatccatggagcggatgaaagaaaatcaggatatcttttcatttgagatatccacagaagatatgtatcgtctggagacaatgcctcagattggatggtccggagaacatccggacagagaacgggtttatttttaaaatccggcgaggcaaaaagaagagaaaaggagagagattatgaaaattacattaaaagacggttcctttaaggaatatgaaaacagcaaatcagtgattgaaatcgcagcagacatcagcgaaggacttgcaagagtggcgacagcaggagaaatcgacggagaagtggtagatttgagaacggtggtagacaaagactgtgaactcaatatcctgacattcaatgatgaaaaaggaaaaggtgcgttccgtcacacagcctctcatatcatggcacaggctgtgaagagattatatccggagacaaaactggcgatcggaccatctgttgcagacggattttactatgatgtagacagagagacaccgtttacagcagatgatctggaaaagattgagaaagagatgaaaaagatcgtaaaagagaatctcccgatcgagcagtttacaaagcctagaaatgaagcaatcgaatatttcaaagaaaaagaagaaccatataaagtagaactgatcgaagatcttccggaagacgagacaatcagcttttattctcagggagagtttacagatttgtgtgcaggtcctcacctgatgagcacaaaatatgtcaaagcatttaagctcacaagccttgcaggtgcatactggagaggaagcgagaaaaatagaatgctgcagagaatctacggaactgcattcccgaaaaaagcagagctggaagaatatctgaacatgttggaagaagcgaaaaaacgtgatcacagaaaactcggaaaagaactgggactctttatgatgagagacgaaggaccgggattcccgttcttccttccaaacggaatggtactcaaaaacgttcttttggattactggagagagattcacagaaaagacggatatgtggagatttcaactccggttatgttaagccgtcatctctgggagacatcgggacactgggatcattacaaagagaatatgtatacaactgtgatcgatgaggaagactttgcaatcaaaccgatgaactgtccgggaggaatcttggcatatcaggcggagccgcgttcttacagagatcttccgatccgtatgggagagctgggactggttcaccgtcatgaaaaatcaggacagcttcatggtctgatgagagtgcgctgcttcacacaggatgatgcgcatatctttatgacaccggatcagatcaaggacgagatcaaaggcgttgcaggactgatcaatgaagtttacagtctgtttggatttaaatatcatgtagaattgtccacacgtccggaagacagtatgggaagtgacgaagattgggaaatggcaacagacgcacttcgcggtgcgctggatgatctgggacttccgtatgtagtcaatgaaggagacggggcattctacggaccgaagattgacttccatctggaagattccatcggaagaacatggcagtgtggaacaatccagcttgacttccagcttccgcttcgttttgaactggaatacacaggagcagacggagaaaaacacagaccaatcatgatccatcgcgttgtatttggttccatcgagcggtttatcggaatcctgatcgagcactttgccggagcattcccgacatggcttgcaccggttcaggtaaaagtattgccgatctctgataaatatctggaatatggacagagtgttctggatcagttgaatgcagccggaatccgtgccgagatcgacacacgtgccgagaagatcggatataagatccgcgaagcacagatgaagaagatcccgtacatgctggttgtgggagcaaaagaagaggaagagaaaaaggtttctgtaagaagtcgatttgcaggagatgaaggacagaaaggtctggaagaatttattgctgcaatcatggaagagactgcaaaaaaagaaatccgtgaagtgacaaaagaagaaaaataaatttttttgaaaatccggataaaagaattggaaatgggcatgatgatactgattttgtaaataaaaaggaggtattatcatgccagaattaaaatgtacagtacagacatgtatgcacaatcaggatttcctctgccgtctggattccattcaggtaggtggttctcaggcaaaggtttcaaaggagacttgctgtgacagctttgaggagcgaaaaacacaggggatggaaaattcctatacgaacgcatatggaaatcatgcgacagcgccttcggatcgttgcggaatcgattgtaaagcaactgactgcatgtacaatgaacagtgtaaatgtgaagcgggaaaggtcagcgtggaaggttcctgtgcgtgtcataaggacggcacagagtgcgccacatttcagtgcagataagaagtgaaagagaagaagcggtgcttggctttatggccgggcatcgcttttttgaaggttgacggtcttcctgttacaggggtataatggaaatacttgcaaaaccagaaaggaatgagatacatatatgaacagagaggaagaaaaacctgaaaaagaggggaaaaaggagaatgactattatacgtcgcagccttcatttggaagcaaaaagacatccagattctggcatcagatcagcagggacgtacggatatttgtggtgatcgcagcctgcatcgtgttttattttgcattattgcgtatgacaaatatttcggaagtttttgggaaaatataccaggtgttaaagccgattatttatggtcttgtcattgcgtatttgctcaacccgattgtaaagctggtggatacgtattttgaaccctggatcaagagaaaatttccacgcattaagaatgcgggcggcatttccagaggggcaggaattttgcttgcgatcgttgtaatgtttgcgttgatcgtggcgctgtgcaatatgatgataccggaactctaccgcagtataagagatatgatccttactgtgccgagccagttgaatcgttttatcgggaaaatgacagaggtgatgagtacagatcaatcgactattggacagatggcagaggcggtcctcaaagaagcaagtgatgcattgcagacatggatgcgtacagaccttctcaatcaggtcaatgtactgatgtcgaatctgacagtgggagtgatcaacattgtcaaggaattatgctatgttctgatcggagtgatcgtatctgtttatgtgctgttcagtaaggagaagtttgcaagccagtgcaagaaacttgtatatgccatcatgcgtccgtcaagagcgaatatggtgcttcatctgacgatcaagagcaacgagatcttcggcggttttattatcggaaagatcattgattctgcgatcatcggagtactgtgttttgtcggactttccattttggatatgccgtatacgatgcttgtgagtgtgatcgtaggagtaaccaatgtgattccgtttttcggaccatatatcggagcaattccaagcgctgtcctgattttgttgtcagatccgaagatgggaatctattttattgtttttgtatttcttctgcagcagctggatgggaatatcatcggaccaaagattttgggggattctacgggattgtctgcattctgggtggtattttcgattttgtttggcggaggaatgtttggatttgtgggaatgattttgggagttcctacatttgcagtcatctattatattgtaaaaatgctggtgaaccatcagctggaaaatcatacgctgcctacagataccggtgcgtacgaccagttcggttatgtaaataatgaaggcgagtatgcaagagctgatgaggcgacagaaaagaaagaagaaaaaggggaataaattatgccaatacgtgtacagaacgaccttccggtaaaagagatactggagcatgaaaatatatttgtaatggacgaataccgggcagcgcatcaggatatccgtccgatcaagatcgggcttttaaatctgatgccgttaaaggaggatacagagctgcagatcctgcggtctctctcgaacacaccacttcaagtggatgttgtgtttgtccgtgtatcaggacatgtatcgaaaaatacatccaccagccatctacataagttttatcagtcctttgaagagatccgcaaccaaaaatttgacggatttatcattaccggagctccggtggaacagattccgtttgaagaagtggactactgggaagaactgcgggagatcatggagtggaccaagacacatgtaacatctacactgcatctgtgctggggggcgcaggcagggctttattatcactatgggattgataaagtgcagcttccaaagaaaatgttcggtgtattcagacatcgggtgagaaacagaaggatccctctggtgagaggatttgatgatgtattttatgcgcctcattcccgtcatacagagattccgatggaacaggtggagtcagatgagagactgaccatactggcagattcgaaagaggcggggctgttcctctgcatggcacaggaaggacggcagatttttgtgatgggacatccggaatacgacagaatgacactggatgcagaatataaacgagatctgaaaaaagggcttgcgatcgaaatgccggtgaattactatccggacaacgatcccaaccagaagccggaactgatctggagatctcatgcgaataatatttatacgaactggctgaattattatgtatatcagacaacgccgtatgatctggaggggacaccgttttaaggaggaatcagagagaggaacgaagagaatgagaaaaaggaatgtgagggggatttgtgcttttttatgcaccatccttttggaatgtctgattccggctggggaggtacaggctcagcgtgcgctggatgtggcaagagagaggggctatcagcttgaggaacggtatcagcctgcaggttcgatcattacggagatcaataccggacaaattttatggcaggaaaatgcacagaaacagtggccgccggcaagtatgacaaaattgatgaccattcttctggcatatgaggagataaaagccgggaatctggaacttgagagtacggcagaggtaaatgaaagatatacagatattgcaggcaggtatgcgctcagcaacaataaaatgcagccgggagccagttatacggttgcagagttgatggatctgatcattgtgccgtcttctgcggcggcaacgtatatgcttgcggatatggtggagtcggatccggacaggtttgtggagcgtatgaatcaaaaggcacaggagcttggaatggtcaatacgaagtacttcaactgtgtgggggttactaacaatctgctgcagccgtatcatccggtgagccagccgcttgatggagataacattacaacaccggaagattatgcgatgctgtgtacttatctgataaagacctatccggatattttaaatcacacaaagtatccccagatcaccgtaaaagaggggacaccgtatgaggagcattttacatcatatcagatttcactggaaggggcaaagtatggtctggagggcacagacggcttgaagacaggttccagcgatacagcagggtttaactattcgtccactgcaaaacggggggacacgcgtctggtggagattgtgatgggtgtgtctgactggtcagatcagactggggaagagctccgtcatctggtcggaaacgcgattatggagcaggcatttgaacggtttgaatataaaaaagtactttccaaaggggtgcatactattgatggaaagaaagtagagatttcaaaagatttatgggactgtgttccaaaagggaaagaagctccgcttacgatcaaggacggtaaagtgctggtagacttggaaagagaatatctgccgggatttcaggcaccggcagtttcgtgcaaacaggtggcggcagtggagaagaacgaacagaagggactgccgctgttcttgaaggtgctgcttgtactcgctgcagtgtttgtgattcttgtgggagcaagaatctcttatgtggcatatcggaaaaagcagagaaggaagcgccgggaagcacagagaagaagacgtgcaagaagaatcagagaattagaggagaagtaagacagggaggaaacaggatgagagagctgcagttttcagcgatggtaaatcagtttcagccgggaatttttaccgcgctgaatgacaagaaggaagagatgattcaggcaggaaaacgggtgttcaatctgtcagtgggaacaccggattttgcaccggcaccgcatgtgatggaggcacttacagaagcgtgcaaagatccggagaactataaatatgcactggcagatctgccggagcttttagaggcagtccaataccggtatgcgcatcggtttggagtggagattcagacagatgagattatgtcagtttatggatctcaggagggaatggcgcatatcggaatggcattgtgtgatcccggggataccattctggttccgaatccgggatatccgctgtttgaaatgagcggaatcatggcaggtgcgaatgtggaatattatgaaatccgcgaggagaacggatatctgccggatctgaaaaatatcccgggagaggttttggagagaaccaaatatatggtagtctcttatccgttgaatccggtctgtgtctgtgctccggatcatttttatgaagaactgatcgcatttgcaaaggagcatcatattgtgatcatccatgacaatgcatattcggatattatttttacaagagaacaggggcggtcctttttatcctttgacggtgcaaaagaggtaggggtagagttttattcgttgtccaagtcctataatcttacgggtgccagaatctcatttgtggtgggaaataaagcgattgtagagaagtttaaaacgctgcgttctcagatcgattatggcatctttctgccgattcagaaggctgcgatcgcggcgcttacggggccggacgatttcatcgaaaagcagaggcaggagtatgcaaaaagaaactgtgcgctgtgcggcggtctgcgaaggatcgggtggaatgtaccggacagtcaggggacaatgtttgtgtgggcaaagattccgaaaggctatgcgtcgtcctttgatttctgtatgcagcttgtggagaagaccggacttctggtaacgcctggaagtgcgtttggaagcgcgggagaagggtatatcagaatggcgctggtagttgatctgcccgtgatcggggaaattcttgaagtgcttgagaaatcggggatgttttagaaaaaagaggaggagacgagtatggactatcagaaagtgatcgaacaggcaaggacatgtatcggaccgtactgtaaagcgtgtgcagtctgtaacggcagagcgtgcaaaaatacaatgccgggacctggagcgaaaggaatcggagatgtggcgatccgaaattttcagaaatggcaggagatccgtatcaatatggatacgatctgtgaaaagaagccggctgatacgacagtgactctgtttggaaaggagttttcctacccgttttttgcaggaccggtaggtgctgtgaagctgcattacggggagaaatatacggatcaggaatataatgaaattttactggcaggatgtatggaaggaggaattgcggcatttacaggtgacgggtcagatgcacgggtaatgcaggaagccacagcggcagtccaaaaactgggaggtctgggaatcccgactgtaaaaccgtgggatatggatacgattcgtgacaaaatggaactggtcaaacggtcaggggcttttgctgttgcaatggatattgatgcggccgggcttccgtttcttcagaatctgaatccgccggcgggaagcaaatccgtggaagagttaaaagaaattgtgaaaattgctgaaattccatttattctaaaaggaatcatgacggtcagaggggcgaaaaaggctctcgaggccggtgcacaggcgattgtggtgtctaaccacggaggaagagtactggatcaatgtccgtctacagccgaagttctgccggatattgtgaaggcagtggatggccggatgaagatttttgtggacggcgggatccggacaggaacagatgtctttaaagcactggcaatgggcgcggatgcggcactgatcgcccgtccgtttgtgaccgcggcatatggtgcgggagtgcagggtgtgagtgcatatactgcaaaaacaggtggtgaattaagagataccatggcaatgtgcggtgcatttgctgtcaaggaaattacagaggaaatgctctggtaaatgagagactttttgtgaaagtttccgtattgactctgactgctcaaagtgataacatattcgttgctgacacatgatatagtttatcctgtgtgataaaaacactaaatatagataaaacaaaagcgaagggagcagaagttgtatgatcagagtcatcaagaaagacgggacaaaggaagattttaacgtgcagaaagtagttgtggctgttaataaatctgcgtaccgtgcactcattaaattcacagatgaggagttggactatatctgtcgtttcgtagaagaaaaggtacagacattgggaattcaggacgtcccgattgcagagatgcataatgtggtagagggagccctggaaaaggtaaatccggtggtggcaaaaagttatcgtgattatcgtaattacaaacaggactttgtacagatgctggatgaagtatataaaaagagccagtccatcatgtatatcggggataaagaaaacagcaacactgacagtgcgctggtatccacaaagcgcagtctgatcttcaacgaactgaataaagagctttataaaaaattctttttgacagtggaagagatccaggcgatccgggaaggatatatttacattcatgacatgtctgcaagaagagatacaatgaactgctgtctttttgatgtgaagaatgtattaagcggcggatttgagatggggaatctctggtacaacgagccgaagacactggatacggcgtttgatgtgatcggggacatcgtattaagcgcagccagccagcagtatggcggttttaccgtgccaagcgtggacgagattttagaaccgtatgcagaaaaatctcataaaaagctgatcgaaaagtacagagggctgggtctggatgaagagaccgtgcagaaagtggcatgggcagatctggaaaaggagatggagcagggattccagggatgggaatataagttcaattccgtatcctccagccgcggagactatccgtttattacagtgacagccggaacccgtaccagcatttatggaaagctggcaacgatcaagatgctggaagtgagaaagaacggacagggaaaagacggacacaaaaaaccggtgctgttcccgaaaatcgtatttttgtacgacgagaacctgcatggtcctggaaaaccgctggaagatgtgttcgaagcgggaatcgagtgttccagaaagaccatgtatccggattggctgagcctgacaggggacggatatgttccgagtatttataaaaaatatggaaaagtcatcagtccgatgggatgccgcgcattcctttctccatggtatgaaagaggcggcatgaagccggctgatgaaaaagatacaccggtatttgtgggaagattcaatattggagccatcagtctgcatcttccgatgatctatgcaaaagcgcagcaggaaggaaagccgttctttgaggtgttggattactatctgaatctgatccgcaagctgcatcagagaacctatgattatctgggagagatgaaagcatcgaccaatccgctggcatactgcgagggcggtttctacggcggaaatctggggctctatgacaagatcaagccgcttctgaagtctgcgacggcttcctttggaatcacagcgctcaatgagctgcagcagctgcataataaaaaatctcttgcagaggatggcgcctttgctctggagacactggaatatatcaacaagcgtgtagaagagttcaagaatgaagacggacacctgtatgccatctatggaacgcctgcggaaaatctgtgtggagttcaggtacagcagttccgtaaaaaatacggaattattgagaacgtttcagacagagaatatgtaagcaacagttttcactgccatgtgacggaggatattacgccgatcgagaaacaggatttggaaggccggttctggaatctgagcaacggaggaaagatccagtatgtcaaatatccgatcagttacaatgtagaagcgattaaatctctggtaagacgcgccatggcaaaaggatattatgaaggagtaaacttctccttgtcttactgtgacgactgcgggcatgaggaactggatatggatgtgtgtccggtgtgcggaagcaccaatctgacaaagatcgagagaatgaacggatatctttcttattccagagtcaaaggagatacacggctgaatgatgccaagatggcagagatcgcagaaaggaagagtatgtaacatgcggtatcacaatattacaaaagatgatatgctaaacggagacggactgcgggtagtattgtgggtggcaggatgcgctcacggatgtaaagaatgtcagaatccggtgacctgggatccggatggaggacttctgtttgaagaagaggcaaaaaaagagctgtttgagcagctggaaaaaagctatatcagcgggatcacctacagtggaggagatcctctgtttccgggaaacagaaaagaaatcacagagctggccaaagaaatccggcagaaatttccggaaaagacccagtggctgtacaccggatatgagtggagtcagatccaggatgaagagatcgtttcttatctggatgtgatcgtagacggcaagtttgaggcggcacaaaaagatacaaagctgcactggaaaggaagcgcgaatcagaaagtgatcgatgtacaaaacagtctgaatacaggaaagatcgtgctgcatgatgcataaaaccgaacagaaaaggaagagacaatgaaaagaattgcaaaatttcacaaggtaagcctggagcagtttaaaaaagactggattgacacgttcggactggatgaagaggcaaatatcgaagagatttatgaaaatatcaaactgccaagaagagcgactgcaggttctgcagggtatgatttctttgctccggtacgtttgatcctggagccgggagagactttgaagattcccaccggaattcgcgtggagatggatccggagtgggtgctgaagtgttatccgagaagcggactgggattcaaataccgtctgcagctgaataatacagtaggcatcattgacagcgattatttttattcagataatgaagggcatatgttctccaagattacaaatgataccaatgaagagaaaaccattgatatcgcgcagggagaaggttttatgcaggggatttttgtggaatatggaatcacggtggacgatgatgtgacagatgtaagaaatggtggttttggaagcaccacaaaatagaaagaacaaaaccttacaggattgtaagtaaatttaagaaaaatgtaagaaaatattatggaagaatacagttgaattctatatactggacgtagaaactaagagttacttcagaaaaaggatggtacagtatgaaatggatcaagagactgtgttctttcatttttttatgtttgtttttggttgttgcatttatgctctggcgagggtatggagactgtcaggatgcattaaagaaaatgagtgtacaacaaatgggtgcacagatacaggcaaaagaggattacacgacactggatcagctgccaaaggattatatcgatgcagtactggcggtagaggataagcggttttataagcatccggggatcgatccgcttgcgatatgcagggcattgtacaatgatatccgtgcaggatcatatgtagaaggcggaagtacgatcacgcagcagcttgcgaaaaatcagttttttacacaggataaaaagatcagtcggaaagtggcagagatgtttatggcatttgagattgaaaaagtctatgataaggatacgatattggagctgtatttaaattccatttatttcggaaacggttataactctgtggcggaagcctgccgtggatatttcgggaaggaaccaatggaaatgaattttgatgaatgtacaatgctggccgggattccgaatgcaccgagtgcatacaatccgctggtaaatccggatctggcgtatcaaaggcagcagcaggtgatccgaaagatggaaaaagcagggtttttgaataaatagaaaagaatcgggaaatctaaccatagaagcaaaccggaattgcacgagactgtgttttgtggcagtccgggaagggaaggacagacattctatggtaattaagaatacaaaaaagatcagtgactcatttatggaaaatatttcctatatggatcggacattgcctgtgggaaaaagttttgatctgataaaacggacaatcgagattggtgaaagaaaagcagttctttattttattgacggttttgtaaaagatgaagccatgctcaagctgatggattcttttatgggcgtgacaaaggaggcaatgccaaaagaggcagaaatgttttctcagaggcatgtaccatatattgaggttgatgtgctgaaagattttgatcaggtgctgcggaacgtgttatccggagtgacctgtctgtttatagaaggatatgccgcctgtattgcgattgacacaaggacatatccggccagaagtgtggaagaaccggacaaagataaatcgcttcgaggctccagagatggatttgtggagacaatcgtatttaatacagcgctgatgcggcggcgtatccgggatgaacatctgattatggagatgacggaagccgggcagacttcccgcacggatatcgcgatctgttatatgtcagaccgagttgacaaggaacttcttgccaatgtaaaatcaaggatcgaaagcctgcatatcgacgatctgaagatgaaccagcagacgcttgcggaggcaatgttcaagagaaaatggttcaatccgtttccgaaatttaagtttacagagagaccggataccgcggtggcgtgtcttctggaaggcaaagtaatcattttagtagataattccccttctgctatgattcttccgacttcgattctggatatgattgaggaagcaaatgattattattttccaacagtgacagggatgtatttgaaggtttccagagcaatcatcacgattctgacggtgtttatgacaccggtatatctgttattcatgatgaacccgtcctggatcccgagcatgtttgaatttactgccgtccgtgatgtgatcaacgtcccgcttgtgctgcagtttttgattctggagctttgtattgacggattgcgtcttgctgcgctgaacacaccgagtatgctcagtacaccactcagtgtgatcgcaggtctggtgctcggagagtttgcggtgcagtccggatggttcaactcagaagtgatgctgtatatggcatttgtagcggtggcaaactatacgcagccgaactttgagatgggatatgcattgaaatttatgcgtctgatcctcctggttctgactgcagttctggattggatcggatttttacttggatgtttattcatcctgtgctttttgatatttaacaagactctgtctggaagaaattatttgaatattaagttgaattagaaaacaggccggggattgcggcaaaatgctgcattgtccggtctgttctgttaaaaagcagaaaaggaatgaaaaaaattttgcgaaatgccaaaaaaaatgatatgattaagaaaatcagacaacaggagggatgaaggaaatgcgggactatattattacagtgaacagtacagtggatatgccgaaggaatggctggcggaacggggcgttccggtgattcctctgaagtatacaatggaaggaaaaacctatacagatatggaaggcctgacaccaaaagagttctttggcaaactcagagaaggaaagatgtctgtgacgtcccaggtgaatccggaagaggcgaaagagatgttagagccgtttgtgaaagaaggaaaggatgtactgcatctgagtttttcttcggggctgagcggaactgccaatagtatgaggatggcggcagaagaactctcagaagaatacccggaaagaaagatccttgcagtggatacgctttgcgcctgcatgggagaaggacttcttttacataaagcgctgcagttaaaagcagccgggaagacaatggaagaggttgcacagtgggtggaagaaaataaacttcatatctgtcataatgtaacggtggatgatctccatcatctgcaccgcggaggaaggatctccaaagcaacggcagtacttggcagcatggtgcagatcaagccgatcattcatgtggataacgaaggcaggcttcaggtgatcgggaaagaacgaggacgtaagaagtctctgaacaagattgttgatatggcagcagaacaggcaaaaggctgggaaaatgatctggtattgatcacccacggtgattgtatcgaagaggcagaatatgtggcaggacgagttcgtgaaaaactgggtgtagatcatattctgattaataatatcggaactgtgatcggaagtcataccggaccgggagttgtggctgtattctgtatgggtgagaaaagatagaacaaaaagaaagcaaatagagaaactgtaaaaaagagttgtcaagaaacagcgaaaatcccgcgggtgcaataatccgcgggatttttattacatggtgataataccaaacgcattcagaatagaactgatcaaaattgcgatcaggaagattggagcaatccatttgatcatgactgtgaacatttttttgcttttgaatgcgccgttatcagaagcttctatttcatcaatgatggcctgcggtttgatcacgaatcctacgaagacgcaagtcagtacggcaacgatcggcatcagcacactgttgctgatgaagtccatagcatccagaatggacattcccagaggcttgataaagtcaagtgctccaaatccgagggaagtcggaattccaatcagcagtgaataaacagcgaccagaatgcaggtaaaccttcttgaccatttgaatttatccataaaaatggaaacgatagtctccatcaaagagatggaagaggtcactgcggcaaaaaatacaaggataaagaacacggttccaagtacggttccaagaggcatgcttgcaaataccttcgggagagtgatgaacatcagtccggcgcctgcattcaaggcagattcatctccgccagagaagataaatacagatggaacgatcatcaatcctgcaaaaaaggcaaatccggtatcgaaaatctcaatctgtcgtacagagctttccagatttgtagattttggcatataggatccataagtgatcatgattcccatagcaagtgacatggaataaaaaagctgtcccattgctgccagaacggtcatgactgagaagtttgacatattcggaagcagatagtattttaatccgtccatggcaccgtccatggtcaggacataaattgcgatcccaacagtcagaacagcaagaatgggcatcatcaccttgctgactttctcgattcctttttccacaccgaagagtacaacaagtgctgtcagagcaatgaacagtgagaaccagagaatcggggatgctgtgcttgcagtgaattcggaaaaataagaatcaccagatacagtggcagcaccttctgtgataaaagcataaaagtatttaaaaacccatcctccgattactgaataataaggaaggataatgattggaacgattgcggcaaggatgcctaaaaagccaaatcgtttatccagtttttggaaagcgccgatggcactcaaaccggtcttgcgtccgatggcgatctctgctaccattagtgtaaatccgaatgtaaccgctaatatgatatagcagctataaatgagcaagttcgtgattttgcataaaagaaagacacctcgattccatgtgttgtataatgaaagtgccaaaacaaacatttgcaacatttacgaaagaaggtgtctctcgcaaatactatacatcattcctcattcatatacaaccagtttaaaaaattaaacttatgcaaattttattcgaaccgagtaataaaccatcttatgagtatcctaatcagtattttcattttaggatatcatggaaaaactacggactttgctaaaaacagttcctgccacagaacgacgattgcccattttctcaattccggaaaatgggatgattcattactttcagatacgttaaaatgctctgtcattgagattatttattcagaagcagcacgcaccggaaagcctgttttctgcattgtggacgatacgattgcttcaaagacaaagccttcgtcacgggctttacatccgattgaagatgcgtattttcaccaatcccatttaaagggaaaacaggactacgggcatcaggcagttgctgttatgctttcctgcaatggcattgttctgaactatgcttttgtaatgtacaataagtcaatttccaagattgacattgtacaaagcattgcaaaggagctgcctgttccaccggtaatgtcctattttctttgcgactgctggtatgtttctgaaaagataatcaatacctttgcacagagaggtttccataccatcggtgctttgaaaacaaaccgtttgctgtatccatcgggaatgaaaaagaaacttcgtgaactggccgccgaattgtctgttacacatcgtgaatttgaccttgtgacagtcaaaaaacgaaactattatgtgtaccggtacgagggaaacctcaacggcatagaaaatgcggtagttcttttgagttatccggaaaaagcatttggtaatcccaaagcattgcgtgctttcatcagtacaaacgcagccctatctacacaggagattctttcctggtatgtgtgtcgatggccgattgaagtatttttccgccagtgtaaggataaactggcactggacagctatcagatacgctctgcacagggaatcaaaaggtactggctgcttatgtcactggcacatttcatgtgtgcagtgggtactggtaggttctgttcgtttgaaactggatatcacgaaatctgtgataccattcagctggaaaagtatcgttatctttttcaatgcgcaaaggaaagcaatgattttgattcatttatgaaattcgcagtgtagttttgtgcaatttttcaaatttgctcatttatagatagcagatcaaaaaagaacctccgccatattttgcggccagatacgggaatcgccagatattcccaagccctacggctgatccgacagcggcaagaataaaaccgatcttgccggaaaaattacttctgtttgttttcatatagaaacctcctcaactctttcactttagccagaacactaaaaatagattgtgctctgttattaagtggtattatgccatggatagtgaaaaaaaacaagttaaattagtgaattaaagtgaaaaagcagtaaagtttttaaaatagagaaaagatgttgacagaagcaggaaagtatggtaaattatatcttgcgcaaagcgaaaaacaaagtagagtatccactctcaccatagcacaagtgagtgactattggtctgatattgttacatgcagaaagtttcctgtataggctctgttatgtagtgagattgggtggatatgagattcactctttttttatgcttgtgcgaagggaaacctaagggaaattcatttgacggaggtatacgaccattagcgatttaatgattaacgagcagatcagagacagagaagtccgtctgattggcgaggatggggaacagttaggaattatgtcatccagagaggcaatgaaacttgccgctgaagcaaatctggatcttgtaaagattgcgccgactgcgaagccgccggtatgcaagattatcgattacggtaaatacaagtacgaacagacaagaaaagaaaaagaagctaagaaaaagcagaaaactgtagaagtaaaagaagtgcgtttatcaccgaatattgatacaaacgacctgaatacaaaggtgaacaatgcgaagaagttcatcggaaaaggaaataaagtaaaggttaccttgcgtttccgcggaagagaaatggcacacgtacagtcaagcaagcacattctggatgattttgcggcattgcttgaagatgtggcagttgttgaaaaaccggcaaaaatggaaggacgcagcatgagcatggttttaactgaaaaacgttaaaataaaaaaatacggacatatgtccagcagggcagtacattaaaggaggaatttatcatgccaaaaattaaaacaaatagagcggcagcaaaacgcttcaaaaaaacaggtacaggaaaactgaaaagaaataaagcttacaagagccatatcttaacaaagaagtctacaaagagaaagagaaatctcagacaggctacaattactgatgctacaaatgtaaagaacatgaagaaagttttaccatatctgtaagatttgtaaaagtaataagaggaggattaagaaatggcaagaattaaaggcggaatgaacgctaagaagaaacataatagaacactgaagttggcgaaaggatacagaggagcacgttctaaacagtacagagttgcaaaacagtctgtaatgagagctctcacatctgcttacgcaggaagaaaagagcgcaaacgtcagatgagacagctttggatcgcacgtatcaatgcagctgcaagaatgaatggattatcttacagcaaatttatgcacggactgaaagttgcaggcgtagatatgaacagaaaaatgcttgctgagcttgcagtaagtgataaagaaggatttgcaacattagcagagcttgcaaaatctaaacttgcttaatagaaagacaaaaaagatgagagatcgatggaaaaagtcgatctcttttttgttcgaagaagaaagtgacactgtcagatgagaaattgcaaagaggaattgcgcagtttctaaaagtctgattataatgaaaaagagaaataatataaattattcaaaaaattagaaaaatttaaaaaaatcagttgacatttttgcgtatcagtagtattatactaaatgtagcgtgtggtgaacaaaacaggctatggtaagcggaagtgtcggaactggcagacgagcaagactaaggatcttgtgatcaatgcgatcgtgtgggttcaagtcccatcttccgcataatgagagaagcatttacaggaaactgtaagtgcttttgttttatgggattaggatatctaaggttactggtaggagaattacaaaggtattgacggctggaaactaccttttgccatagaaggagagaagagtatctttgatgggttggaaatttcaaaagatacaaagctttgtgaagcgtatatggggaaatatccggttatttcaatttcccttaaaggaatcaatgctgctgcttatgaggatgcatttgattttgcagttcagattatgcaaagaacagcggaagaattccagtttctatcagatagtgaatacctgagtgaacatgataaatctgtatatagagaacttttggacagtaatatgagcgaaactgtattttgcggtggactgaaaatattgtcaaaattattagagaagcattatagattaaaaggttttcttttaattgatgaatatgatgttccattagcaaaggcatttgaaaatgggtattatgagcaaatgatatttcaagactatgtaaatgtgtttccggaaaactattggatcaacaccagcagtaatgatgccgtcaagaaatttattcaaatgtccgacaatcttaaaaccaagcgtgagattgaaactctgcttgccggcggggaaatcataaaagagattcatcaggagctgatctatccggaaatgtatcagtctttagagaacgtctggagtcttttatttatgacgggatatttaacgcagcgtggaagtggaagggttgatgcaaagccgtagcgttacctggagtatagaaaaactcctatgttataatttgttgaaactattaaaaacaaagaacatgaaaattataaacaaaaaaggtatgattccgaacatggaatcatacctttttataatatgcggaagatgggacttgaacccacacaagcgcaatgcttacaagatccttagtcttgctcgtctgccagttccgacacttccgctcattatgatgaaaaacttacgtgaagcacatcacttttagtataatactatagagtttttgaaatgtcaactataaatttgaaaaaagtgtgtgatataaaattgacaattctgtgaaacgtgatatactaatagaaagtttacaagtaaacaaatggaggtggaaaaatgagcgcagagatgacagtggaaggtatgatttctgtgtttatgaagatcaggaaagtgtatgcagatgagtttgggagaatgttgggaaatgagacatattctccgaatgaaatatcaattttgctgtttttggcaaataatccttcaatcgatacgaacagtcagttatgtacatgtctcggcgtttccaaggcgcttgtatgcagaagtgtagatgcgctgctggggaaggagatgatcatcagtgtggcagatgaccatgataagagagtgcagcatctaaagctgacagaacatgcacttcctgtgatcgaacagcttggaggaatcaagcggaagatcgatcaggagatccttgaggggattcccgaagaggatattgcaaatatggccaatacaatggagaagatttttgcgcgatttgaagaacgggcaaaagggaaggagtcatcattatgaaactgaaaatgtcaaaagaggtggatctgggaaaggagccgatcggacacttgttgttcgtactggcagtgccctctattatctcacaggtggtcaatgcactttataatatggtggacaggatgtatatcggacatattccgggagagggtgcggcagcacttaccggacttggtgtatgttttccgattattatgatcgtctctgcatttgcggcactgatgggaatgggaggcgcaccaagagccagtattctgatgggaaaaaaggataatgagggtgcagagaagatactgggaaactgtttttctgcactggtgattaccgctgttgttttgacagctctggtgcttgtatttaagcgtcctttactgatgatgtttggcgccagtgaaaatacgctgggatacgcagaaagctatctgaacatttatgcggttggaacgatttttgtacagctgacacttggactcaatgcatttatcgccgcacagggcttttctaagatcagtatgatgacagttgtgatcggtgcagtgacaaatattgtgctggatccgatcttcatttttggattccatatgggcgtgcggggagccgctctggcaacggtgctctctcaggcaatcagcgcagtctgggcaatccgcttcctttctggaaaagatacggtgctgagattgaaaaaagagaatttcagaattcgaaaagatgtgatggttccatgtatcgggcttgggtttgcgccgtttatcatgcagtctacagagagtattctggtattgtgctttaactcttctttattaaaatatggtggagacctggcagtaggcgccatgaccatcctttccagtgtgatgcagtttgccatgctgcctctgcaggggttgacccagggaggacagccgatcatcagttataactttggagccaacaatccagaacgtgtgagaaaaggattccgtctgctgttgttgtcgtcagtgatttatgcggcctgtatctgggcagtagcagaactgcttccgggtgtatttgttacgatctttaccaatgacttgcagctggcagaatttgcaagatgggcgatgcgtatttatatggaggcagtggtactgatgggagcacagattgcctgtcagcagacgtttattgcgtttggaaattctaaaatttcagcgtttttggcaatgtttcgaaagatcatcgtgttgattccgctgatctatatcctgccggtatttctggaagacaatgtacaggcagtgttcctggcagagccgatcgcagacgtgatcgcggttgcgacaacattgatcttgtttcgaaaaaacttcaaaaaagtactggcggaaatgaaacaaaaatcagaaacgcaagatatctgattttttaagcaaaatcgccatggagggtgatcgccagtcgttacgaaaagaaaaccacatggattttatgaaatgcagtgtatttcacagaaggtcatgcggttttttctgatttcaggataaaaaagaaacagatgggaaaactaagacagaaaggatcgggagggcaaatcatgttagaaaaagtagatttgacaatgaaaatggaaaaaagtgaatataaggcaaaaatgactgctttgaagctgcagatgggaaaacttcagaggcagtgtaaggaaatggggcttccgatcatgatagtatttgaaggatttgatgccgcaggaaaaggaatgcagatcggaaaactgattcagagtctggatccgaggggatttgaagtatttacggtgaaagaggagacaaaagaggaagcgatgcatccttttttgtggcggttctggacgaagacaccgccaagaggccggatggcagtatatgatggaagctggtattttaaggtgctcagtgaccggtttgaaaagaagatgcgagaatcggaaatagaaaactgctatcgctccatctgttcctttgaaaaacagattacggaggacgggacacttctgattaaattgtttttggatatcgatcaaaaggaacagaaaaaacggtttgataaactcatggagtctaaagacacggcgtggcgtgtgacaaaggcggatctgaagaaaaatgaaaaatatgatcagtatcaggacatgatagaagaaatgctgcagaggacagatacggaatatgccccctggacgatcgtggaggctacggacagacgctatgcaacagtcaaaatctacaccgtgatcacgcagatgctgacagcagggattgacaacaggcgcagggagattgcaagagagacggcggcagaggtgatccgggaagcggaaaaagaggcgtctgagaatagaagcctgatggatggagcaacaaaagggtttcaggagtctgtactggcaaaagtggacttgagtttgtattgtgacaggaaaacgtatcagaaaaagctcaaagaatatcagaaaaagatcgagaagctccatggagagctgtatcagaagcgtattccggtggtgatcgggtttgaaggctgggatgctgccggaaaaggaggagcgatcaagcggctgacagaaaagatggatgccaggggatatgtggtgaatcctacagcggcgccgaatgatctggagaaagcacatcattatctctggagattctggaaaaacatgccaaaggacgggcatatcgcaatttttgacagaacctggtacggcagggtgatggtagagcggatagaagggttttgtacgcaggaagagtggaaacgggcgtataaggagatcaatgatatggaaaaggatctcgcggacgcaggggctgtagttttgaaattctggatgcagattgacaaaaaagagcaggaaaagcgattcagacagcggcaggaaaatccggaaaagcagtggaagatcacagaagaagactggagaaaccgtgaaaaatgggagcagtatgaggaggcggtcaatgagatgctgatccggacttccacagaatatgctccatggatcgtggtagagggaaatgataaatattacgccagattaaaagtgcttgagacggtgatcgatgcactggaaaaaagaatttcaaaaaaataaaggaaaagagatgtgaccgcagaatataataagtgtaggggattttaaatgctcaaaaatgaaagagaagtaagaggcagacatgtattattcggaagaagtaatcgaagaagtaagaacaaaaaatgatattgtggatgtgatctcaggatatgtgagactgcagaaaaaaggtagttcctatttcggactctgtccgtttcacaatgaaaagtccccctctttttccgtaagcagagaaaagcagatgtattactgctttggctgtggagcgggaggaaatgtatttacatttctgatggattatgagaatttttcatttgtggaagcactgaagtttctggcggacagggcaggtgttgtactccctgagatggagtattcaaaagaagcaaaagccagggcagacagaaagacacagcttcttgagatcaacaagctggcagcgcagtatttttatgtgcagctgaagtctgaacagggaaagacggcgcatgcatatctgaccggcaggcagttgtcggaggagacgatcaaggcatttggtctcggatattccagcaagtacagcgatgatctctttcgttacctcagaaaaagggggtatacggaagatctgatccgtcaggcgggactgatcaataccgatgagaaaaatggtgtttatgacaaattctggaatcgggtgatgttcccgatcatggatgtgaacaaccgggtcatcggatttggcgggcgtgtgatgggagacgcaaagccaaagtatctgaattcaccggagacagagatctttgacaagagccgtaatctgtacggactgaaccgggcgcgcacatcaagaaagccgtattttctggtgtgtgagggctatatggatgtgatcgcgctgcatcaggcgggatttaccaatgcagtggcatcactgggaactgcattgacgaccgggcatgcggcattgatcaagcggtatgttcaggaagtatatctgacctatgacagcgatgaggcagggacgagagcggcgcttcgggcagttccgatcttgaaggaggccgggatcactgcaaaggtgatccggatggatccatataaggatccggatgaatttatcaagaatctgggcgctgaggaatttgaacgcaggatcggaaatgcgagaaacggatttatgttcggactggagatgctggagaaagagtatgatatgaattctccggaaggaaagactgcatttttccaggaggctgcaaggcgtctgatcggctttgaggatgaactggagcggaacaattatattgaagcggttgcgggtacatatcgggccacagttgagagcctgcaaaaactggtggcaaagacggcggtgagagaaggaatggcaaagccggtggagcgtccgaagcaggccacaggcagcgagaagccgaaagaagacggggtgaagatttcccagaaaattctgcttacctggatgatcgaggacagaagactgtttggaatcattcagaagtatatcagtccggaggattttccggaacctctgtaccatacagtggcagaatttttatatcaccagtatgaggaaggagaattaaatcccgccaagatcctgaatcattttacaaaggaagaagaacaccgggaagcagcttcgttgtttcatacgaagatccagaagctgacgaccaaagaggaacgggaaaaagcactgcaggagacaatcgtaaaagtcaagacacacagtatcgattacaggaccatgcatctggagccgacagatatcatcggacttcagaagctgatggaggaaaagcgaaaactggatgacttgaagaaactgcatatttctattgaataaggataaaataaaacaagacagtctgcgtttgctgcagacagaggaaggatggacacatggaagaaaacattcagaagtttacggaaagactcagagaactggtagcacagggaaagaaaaagaaaagtatactggagatccaggagatcaatgacttttttgcggatatggaactggaagcagaacagatggaaaaggtatttgagtatctggaagccaacaatattgacgtattgcgtatcagcagtgacgatgatctggacgtagacatggacgtgatcatggcagaagaagcggatgatgtagatatggagaatattgacctgtcagttccggacggtgtcagcattgaagatccggtcagaatgtatttaaaagagatcggaaaagttccgcttttaagtgcagacagagagattgagctggcgcagagaatggaggaaggagatgaagatgcaaagaaagagcttgcagaagcgaaccttcgtcttgtggtcagcattgcaaaacgttatgtaggacgcggaatgctgtttctggatctgatccaggagggaaatttaggactgatcaaagcagtggaaaaatttgattatcacaaaggatacaaattcagtacgtatgctacctggtggatccgtcaggcaatcacaagagcaatcgcagatcaggcgagaacgattcgtattccggtgcatatggtggagacgatcaacaaactgatccgtgtgtccagacagcttctgcaggagctcggaagagagccgctgccggaagagatcgcaaaagaactggatatgccggtagaacgtgtgcgtgagattttgaagatttcccaggagccggtatctttggagacaccaattggtgaggaagaagacagtcatctgggagattttatccaggacgataacgtaccggtgccggcagaggcagcagcgcagacactgctcaaagagcagcttgatgaagtgctggatacactcacagaaagagagcagaaagtgcttcgtcttcgtttcggaatgaacgacggacgtgccagaacgctggaggaagttggaaaagaatttgatgttacccgtgaacgtatccgccagattgaggcaaaagcactccggaagctgcgtcatccaagccgcagccgcaaactgagagactatctggactaagatatgaggaatgaattatcaaaaagactgcaggcagtggctgaccttgtgacagtcagggagtgtgtggcagatatcggaacggatcacgcctatattccgatttatctgacagagcataaaaaagtaaaaaaagcgtttgcaatggatgtgaacgaaggtccgctgatccgggcagaagagcatgtaagagaagccggattaaaagagcagatcaagatgcgcagatccaatggcttggaaaaactgtctccgggagaagtggaagccgtcattatcgcgggtatgggcggcggacttgtgatgaggattctgacagagggacaggctgtggcagagacattacaagagtgcattttgcagccccagtcggagatcgcaaaggtgcgggaatttcttctgcagaacggctatcagatcgtgcaggaagagatggtactggatgaaggaaagtactatccgatgatgcgtgtggttccttcaaaggaaagcgaaagagagaagtgggatgaaacccagcttcgatacggaaaattacttttggagatgcgccaccccatactggagcagtatttaaagagagaagaacagttaaaagcagagattctggaaaaactggatcatcagagaggggaacatatcacaaagagacaggcagaactcaaagaggagcttgtctgcatcaggaaaggactgaagtattatgcagtgtaaagacattatggcaatgattgagggtacatatcccaagagtgctgctctgggatttgacaatgtagggctgcaggcgggaagaagtgaaaaagaagtccgtcggatttatctggcgctggatgcaacagatgcggtcattgaggaggcgattgcgcaggaagcggacatgctcattacccatcacccgctgattttttcgccgcttaagcatattacggatgaagattttatcggccgcaggctgttaaagctgatccgcagtgatatttcctattatgcaatgcataccaattatgatgtgcttggcatggcagagctttccggacagattctgggactgacagataccgaagtgctggatgtgaccatgaatacacagacaaaagaagaggggatcggaagagtgggatcccttccaaaagagatgacactggaagaatgctgtgtttatgtgaagcataaattaaaactgggatcggtcaaggtgtttggagatatgaagcagccggtaaaaagacttgcggtttctccgggatccgggaaaagtgccattgctccggctgtctcgaaaggagcggatgttcttgtaaccggagatatcggacaccatgaaggtctggatgcggcggcacagggcgtttcggtgattgatgcgggacattatgggacagagtatatttttatggaagatatgaaacggtttctggaagagagacttcctgcagctaaaatcatcaccgcaccggtcgtgcatccgtttcaggtattgtaagattccagacgggagggcaggcttatggagaaagaattttgtaccgttcagacaggggacaaggtaaagtgttacgagagaggaattgcctacaagaagatcgcagaagaatttcaggaagaatacccggccaaaatcgtactagcattggtggacgggacacgtcttcaggaattgaacaaacgattaaagcaggattgtaaaatcgaatttgtgacagtgaaagacccgatcggttatgagacttatcgtcgaagtctctgttttatgcttgtcaaagcagttcatgatgtcggaggacatgacaagatccgcaatgtgaagatccatttttccgtcagcaatgggtattactgtacaattgacggagatgtcgttctggatcagaagtttctggatcagattgatgcaaggatgcatgaacttgcagaagcccaaattccgatcgagaagcgttctgtgcatacatcggatgcagtagagctttttggcagacacgggatgtatgacaaggaaaggctgtttggataccggagggtttccaaggtaaatatctaccggatgaatgagtttgaggattattactatggatatatggtgccggattccgggtatttaaagaattttgcgctgcatctgtatgatgaaggatttgtactccagatgccgctacgaaaggaaccggatgtagtcccggcctttgaaccgcgtgaaaagctgtttcaggtattaaagagcagtgtgcagtggggcgatcttcagaatattgagacagtcggagcactcaatgacatggtcacaaaatatgatatgcgtgagatcgtacttgtgcaggaggcttatcaggaacggcagatcgcacagatcgccgcgcagattgccgcgaagccggaaacaaagctggtgatgatcgcaggaccgtcttcatccggaaaaacaacgttttcgcacaggctctccattcagcttcggacgcagggaatgagaccgcatccgatcgcagtggacaattattttgtggatcgggaaaaaacaccccgggatgaggatggcaattacaattttgaatgcctggaggccattgacatcgagcagttcaataaggatatgcaggcacttttagccggagaggcggtgcatcttccaatctttgattttaagaaaggaagcaggagctatgacacgactccgacacagctgaaggaacaggatattcttgtgatcgaaggaattcactgtttgaatccggagctttcccgtcagctttcatcagaccggaagtttaagatttacatcagtgctctgacacagttgaatattgatgagcacaaccggattccttctacagacggaagactgatccggcggctggtgcgggatgccagaacaagaggaacttctgcacagaaaacgcttgcaatgtggtcgtcagtcagaagaggggaggaagagaatatttttccgtatcaggaagaagcggatgtgatgtttaattcttccctgttgtatgaactggctgttttaaaacagtatgtggagcctcttttgttcggagtggaaaaggattcaccggaatatcttgaggcgaaaagacttttgaaattttttgactattttatcggaatcggaagtgactatgttccggcaaattcgctgctcagagaatttatcggaggagggtgcttcccggtataagagaaaagaagggaagagacatgggacagaagcgtaaaaagatcaatggaaaagagcttgtactggatatttcttatgatattgtgggaagtgtattatatgcccttgggatttatacgtttgcaaaaacggcagattttgcaccgggcggattatccggtctggcgctgatcatgaatcatttatggagatttccgattggtattacaacccttgctctgaatattccgcttatcattttgagctttaagctggtaggacgaaggtttatgttcaaatcagcaagaaccatgattgtttgtacgatatttctggatcttatttttccgtatacaaagccttatacaggagagccgtttatggcggcactgttttccggtgtctgcctgggagcagcgcttgcgttgttctatatgcggggatcctcctccggcggtaccgattttctgactatgtcgatcaaagcagtcaagccgcatttgtcaatcggatttgtaaccatggcgatcgatcttttgatcattctgcttggatggccggtattcggaaatgtggacgcagttctctatggtctgatctcggcatttgtgacatctgtcgtgatcgataagatcatgtatggcatgggagccggtaaactgatcctgattattacgataaaggcggatgaggtttccaaaaagattgatcagatcagcggaagaggttccacagcaatccgggcgatcggaacctatacaaaagaggaaaaggatgtgctgctctgtgcctgctccagctcccaggcgtactccgtcagaagtgctgcacatgaggtggatccggatgcatttgtgatgctgacagagacgagcgaggtgttcggtgaaggatttattgatacaagaaaataaaagataagacaaaatgagcgtgtttgccacatggtttggaacacgctcatttttatttatcggacgtaagtccgcccgccgcaggcatgcattacgggatgcccggagggggatactatttggattttacttcccgccacaattggttgtagattgcatcgtatttgtccccgaggaaacggaatgtttcgcagttgacaagatcttccggttccggaaacgcaatcttgctgttgcggatggccggatcttcgatgagttctcgtgctccggtattcggagtggagtaggtaatgtagtcgaagttcattttggcaatatcaggccggcagaggaagttgataaatttttctgcattttctttgtgctgtgcatttttcggaattacccaggaatcaatccagagattcgatccttcttttggaattacgtacttcagatttggattctctgcctgtgtatagatggcttctcccgaataaatgacaccgatggcggcttcgtttccgatcattttgtcacgcacctgatcaataacatatgcctgcacaagaggtttctgatcaatgagaagctgctttgcttcctccagttcatttaaatccgtggagttgagcgaggcgccgatgtattttaatgccactgcaaatgcatcacgaacactgtcctgcatcagaatgttgtctttatatttttcatcccagagtacggaccagctgtcgatcggttcatctaccattgtcttgttgtataagataccgacagttccccagcagtaagggacagagtaaaggttgtccgggtcaaactggcgggactgttccagataagtgtcgccgatgtatttgatattcggaatatggtcaaaattgatcttggcaagcagatcattttcaatcatacgctggatcatatagtcggaaggacagaccacgtcataagcgatggcgccggactgcactttgggatacatgatttcatttgtctcgtattcttcataaacgacctggataccggtttccttttcaaacatcgggatcacgttcggatctaaatattcgccccagttgtatacgatcagctgattgtctccgccggtcactccgtttttggatccgtaataaaatccgccggcggcaatgacaaggatcatggcagccggtactacgcgcttgaagatgatatggctgatgctctgatgccttctgcgcttagaagcggctgatggggaagaattcttctgcttgggtgtaaagttgatcaaaaacagcagaacaagtactgtcataaacatgattgtggaaagtgcatacatttccggtttgattcctttacgcacttcactgtagatcttggtggaaagggtatccacccccggtcctttcgtaaaatgtgtgattacaaaatcatccagtgacattgtaaatgccagaagaaaaccggaaatgatccccggcatgatatccggcagtacgactttgaaaaatgcgtagatcggagaagctcccagatccagtgcggcttcataagtactcttttttgtctgctttaattttggcatgacactcaatattacataaggaatattgaatgtaatgtgtgccagcagtaccgtggaaaatccaagggtaaaacgaaatgcaacaaagagcagcatcagggaaattccggttacgatatctgcgttgagcatcgggatgttagttacgcccatcataaaagtgcgcatcttcggtttcattgcctgaatcccaagagaggctgcggttccgatcaaggttgcaatcagtgcagaaagcaatgcgatgatcagggttgtgtaaagtgcgttcataatatccggattctggaacagtgaaatgtaccattttccggtaaaccctccccattttgcccgggttttggaattgttgaaggacagaacgatcagtgttatgattggtgcatataataaaatgaggatcaggatcaggtaaatccgtttggctgtattttttatcaaaatgcatttccctccccttctttatcgtattttgcgatcattgccatgctggcaataataaagatcatcaacacaagggaaagaccggaacccgtattccagttgcttccttgtttaaattcctgctcgatcacatttccgataagcaggatcttacttccgccaagcaggtcggaaataacaaatgtggtcagtgacggtacaaagaccatggtaattccgctgataataccaggtacgctcaaaggaagaataatttttgaaaaggtctgaagactgtttgcacccagatcccgggcggcaaaaatcacatccttgtcgatcttggaaagtacattgtagatcggcagcaccataaacggcaggaaattgtacaccatgccgaggatgatcgcacccggtgtgttgatcaatgtaagatccggaaggtggaaaaagtgcaggatcatgttgatgacaccgtttttttcgagcaaattttgccatgcgagcgtccgcagtaaaaaattcatccacataggaagaataaaaatcaatacgatgaaactggtctgattgacattcttttcagacagaatcatggcaagcgggtacgcaagaatcagacagaccagtgtactcacaaaggaaagcagaagggcaagtcccagcgcttttaaattctcttgtgtggtgatctgagccaagttcatcagtgtgaaatttccacttttgtctgtcaatccataatacaggatcatcaaaagtggaatgatgataaaggagacagcccagaataaatatgggccgctcagtaattttctactcttcaatgcctgccgcctccgcatcttcagattccggttttttcatgatctggatatcaaatgggtccacacggataccgacctctgtgccaacagggaacatatcggtactgtgtacgagaagctcgtaattattggcaagtacctccatttcataatgaacacctttgaagatcagatgggtgaccacaccttcgatgattccttcttcaggcttgaccagatcgatgtcttccgggcggatcaccgcatctaccggtttgttgcgtccgaatccaacgtccacacactgccaggtggctcccagcattttgacaaccttatcttccaccatggtggcaggaagaatgttgctgtctccgataaagtctgctacaaaggcgttctgtggttcgttataaatatcctccggtgttccaatctgctggatatatccctgattcatgacaacaatcgtatcggacatggtcagagcttcctcctgatcatgggtaacgtagacaaaagtaatacccagttcgtttttcagacggatcagctcatactgcatgtcctgtctgagttttaagtccagtgctccaagcggttcgtcgagaagcagcactttcggttcgtttacaattgcgcgggcaattgcgatcctctgttgctgaccgccgcttaaagaatccggataccggtctttaaaatcctccagattcacaagtttcagtgcatatttgatcttgtcatcaatataatgtttggactttttcttgatcttaagaccaaatgcaatattttctgcaatggtcatatgggtaaagagcgcatatttctggaacacagtattgagctgccgtctgttgggcggcagcttgttgatgttcttcccgtcaaaaatgatatctccggaatccggagtctcgaaaccacccagaattcgaagcagcgtggtcttaccgcagccgcttggaccgagcagggttaaaaattcattttcacggatataaagatttaagtggtccaaaatgacgttctcatcaaaagattttgtgacattcacaatatcgatcagcttattagacatctttctcctcctggtaaaagtttttgatggaatccagacggctgcacatattgcacagaagaagatctgcgagtgtaagtgcagtcatagattcaactaccaccacggcgcggggaacgatgattggatcatgtcttcccttgatggagatttcaatttcttcattgtctaaatttactgtggactgtgtgcgggcaattgatggggtaggcttcacagcggcacgtacgatcagttcggaaccatcgctgattccgccaagaacgcctccggaatggttggtctttttggtgagatgtccggattcaagggtaaatgcatcgttgttggtgcttccattggccaaagacgccagaaaaccatcaccgatttctactgcttttacagcgcccatggacatgatacccttggaaagctgggcgtccagtttgtcaaataccggttcgccgagcccgacaggaagtccggtcacacgacactcaataattccaccgcaggaatctttctgcgccatcatctcgttgagatattcagcggctgtttcggccaatgcattgtttggcatataaaaaggattttctgaaatttcttcaaaatgataatcctgttcgggaactttgacaggtccgattgattttgaaaatgtgatcagttcgattcccagggtttttaaaagggcagaagcaacagctccggcagcaacgcgtccgatggtttcccggccggatgtgcggccgccgccgcgataatcgcgaaaaccatatttactgctgaatgtgtaatcggcatgtcccggtctgtaataggaagcaatttctccataatcccgggaacgctgatcctgattgcgtacgagaagggaaataggagtcccggttgtcctgccttcaaagacaccggagagaatttctacctggtcagactcactgcgttttgttgtataacggctttgacccggtcgtctgcgatcgagaaaagcctgtatattagtttcgcacaagggaagtcctgccggacagccatcgatgacaacaccgatcgcggtaccgtgagattccccccatgtagtaatacgaaataaagttccaaatgatgaaccactcatatgtcaaaatctcctttcttttgcatataaaactattatataagaagacatattatcgtgcaatccttatttttatgcaactgcccgattagatcatgaacggcaggatcgggcagatagaagtgcaataaatttatttgaaattcctatgttttttctgtacaattcaggaaaagcgtaatataatgaggactagatactggctgaaaggagaacggcaatagcagatgaaagaaaaaatcagaaaaaaaacgaaaagaccgcagacagaagacatgatttttacagaagaagactttgaagatgtttctgaagagacgaaaggaaattccccaaaacacaggaaacggtctcgtaggacttcaggtggatttccggtcagaaaagcggggatcatcgcaggaggagtcgtcggagtgctggtgcttttatatcttggaatttctgtattttttatgagtcatttctatataaatacaacaatcaacggaaaagatttttcgggaagatcggcatcatctgtggaggcatatatcaaagaacaggtaaaagactacaaactgaccattaaggaacaggacagtaagtcagatgtgatcaaaggaagtgatatttctcttcaatataaagagagcgatgagattgagaaagcgttgaaaaagcagaatggttttgcatggccgctggcgctgttttcaaaaaaatcagaaaagatttccattgcagtttcattcgatgaaactgctttaaatgaaaagattcagaacctgcaggcagcgacagtagagcagattccggcagaaaacgcaaaaccggagcttcagggtgatacctatgtgatcaaagaggaagtatatggaacggcagtagatatggatgtattgaaagaaaaagtgaaccagtatatttccgaatttcgatcagaactggatatggagaaggaaggatgctatgcacgtccgaaatacacaaaagattccaaggaagtgcaggctgcctgtgatacgatgaacaaatatctgaaggcaagtattacctataccatgtcagaatctgttgttgtggataagactctgatttccacatggatcggcgtagatgacaatatgaatgtggtttttgataatgatgccatgaaagcatggtttacagagtttggtgacaaatacgatacggtagggaccacgagaaatctgacaacaccgaccggcaaggcaacgactgtaacaggcggtacatatggatggtcaatcgatgaagatacagagcttgtcaatctgcagaacagcatcaaaaacggtgaagtagtcacaagagagccggcatactataccggaggtgcagcaaaatctcatggagaacaggactggggcactacatttatcgaggttgatctaagtacccagcacatgtggtatctcaaagacggaagcgtggcaatggaaacagatgtggtgacaggggttccggttccggagaggatcacaccggaaggggtgtatgacattctggagatgaccagagatgaggtgctgatcggagagaccgatccaagtacaggaaagccgatttatgagacaccggtcaactattggatgcgcgtaacctggacaggaattggttttcatgatgcaacctggcaggctgcatttggcggaacgcgttataaggacggagcagggtctcacggctgcatcaatatgccgctggatcaggcagcagctctgtttggaatgatcagtgtgggaacaccggttgtgattcattactaatcataacagatatagaaaaaagacaaaaaggggcagcgtgagagagcgcggtcccctttttcacgaagataaaggagaagaaattatgtatgagttgatcaaaaaagacggacgggcaaaacgggggcgttttcataccgttcacggaacgattgaaacaccggtatttatgaatgtaggtactgcagcggcgatcaaaggtgcagtttcaacagatgatctccggggaatcaagacccaggtggagctttcaaacacgtatcatctgcatgtccgcccgggagatgaagtggtgaaaaaaatgggaggacttcacaaatttatgaactgggacaagccgattctgacagattcgggcgggtttcaggtgttttctctggcaggccttcgcaagatcaaagaagaaggtgtgcattttaattcacatattgacgggcgaaagatttttatgggaccggaagagagtatgcagatccagtccaatctggcatccaccattgccatggcatttgatgaatgtccatccagcgtggcagaccgtgcgtatatgagggattcggtggcaagaacgacacgctggctgaagcgatgcaaagcggagatggatcggctcaataccctaccggatacgatcaacccacatcagatgctgtttgggatcaaccagggcggaatctatgaagatatccggatcgaacatgcaaaacagatcgtggatctggatctggacggttatgcagtcggagggcttgcagtaggagaaagtcatgaggagatgtaccggatcctggatgcggttgttccatatctgccggagcagaaaccgacctatctgatgggagtgggaacaccgatcaatattttagaggcggtagacagaggagtcgatttctttgactgtgtttacccgagcagaaacggacgccatggacatgtatataccaaccatggaaagctgaacctgttcaatgcaaaatatgaactggatgacagaccgattgaggaaggatgtcagtgtccggcatgcagaagctacagcaggggatacatccgtcatcttctgaaagcaaaagagatgctggggatgcgcttatgtgtactgcacaacctgtatttctacaacacgatgatggaggaaatccgtgcagcaatcgaagcgggagagtatcaggcatacaaaaagaaaaaaatcgaaggtatgacatccggaaaatagacacttttccaaatgtttatagaaaatttacttgaagtatcatgattttttgtgtacaatagtaatattgtcggacgcagggaagcgtgtgagacaaaatgaagagtatatcacggtaagtggaggtgtgctggtaagatgttaggtgttattgtaatttatgtagtattattcggaggtctctggtggttcatgatgcgtcctcagaaaaaggagcagaagagaatccaggcgatgctggcttctatggaagttggagatactgcattgacaacaagcggattttacggtgtgatcatcgacatcacagatgatgatgtgatcgtagagtttggtaacaataaaaactgccgtattccgatgcagaaagctgcaatcgcgcagattgaaaaaccaaacgcagagtaagaaaaaaaggaagctgttttatggccggagaggctgtagaacagctttttttaaacagaagcttatgggatttacagagttcgctctgttttttgacacttttgtgtggtaaagggttgaaatgagaaaagaaatgaggtattatttagaataacactttgaaaattggaaggatgagtattatgaagttgaatatcggagtgatcaaaggagacggaatcggaccggaaattgtgacagaagcgatgaaagtactggatcgaatcgcagaagtttatggacatgaatgtgtgtatacacagcttttgatgggcggagcatccattgacgtacatggtgttccactgacagatgagacgatcagcaaagcgaagctgtgtgatgcagttttgatgggctcgatcggcggagatacgaggacttctccatggtatcaactggagccttcaaaacgtcccgaagccggactgttaaaaatcagaaaagaactgaatttatttgcaaatttaagaccggcagtattgtatgaagaacttaaagaagcgtgtccgctgaaagaggagatcatcaaagacggatttgatctgatgatcatgcgggagctcacgggcggcctgtattttggggagcgcagcaccagagaaatagacggggtgatgactgcctgcgatatacttacatataatgaagaagaaattcgaagaattgcgaagcggggatttgacatcgctgcgaagcgtagaaaaaaagtgatcagtgtggataaggcaaatgtgctggattcctccagactttggagaagcgttgtggaagaggtggctaaggaatatccggaagtgactctggagcatatgctggtggataattgtgccatgcagctcgtgaaggatccggcacagtttgatgtgatcctgactgagaatatgtttggggatatcctttcagatgaggcgagtatggtgactggatcgattggaatgctttcttctgcaagtctcaatgagacaaaattcggactttacgagccaagcggcggctctgctccggatattgcgggaaaaggcattgccaatccgatcgcgacgattctgtcagcagctatgatgcttcggtttacatttgatcttgacagggaagcagatgccattgaggaagcggtacagcgtgtattaagagacggttaccgcacgatcgatattatgtcagagggaagcatacagatcaatacccgcgagatgggtgacaggatctgtgcatatatccaatagaaaaaacagaaattcaaaaaaaggaaagaggatgatagaagatgagaagtgatactgtaacaaaggggatgcagcaggcgccgcaccgttccctgttcaatgcgctgggaatgacacaagaagaactggaccggccgttgatcggaattgtgagttcttataatgagatcgtgccggggcatatgaacctggataagattacacaggctgttaaaatgggagttgctatggcaggaggaacaccgatcatggttcctgcgattgcagtctgtgacggaattgccatgggacatattgggatgaaatattcgcttgtgacaagagatctgatcgcggattctacagaagcactggctatggcacatcagtttgacggacttgttatgataccgaactgtgataagaacgttccgggacttctgatggcagcagcccgtgtgaatattccgacgatttttgccagcgggggaccgatgctggcgggtcatgtgaagggaagcaagaccagtctttccagcatgtttgaggcagtcggttcttatgcggcaggaaaattttcagaagaagatgtgtgcgagtttgaagaaaaggcatgtccgacctgtggttcctgttccggtatgtatacggcaaacagtatgaactgcctgacagaggctcttggtatgggactgaaaggaaacggaaccattccggcagtgtattctgcaagactgcagcttgcaaaacatgcgggaatgcaggtgatggagctggtaagaaagaatatccgcccaagagacattatgacaaaagaagcgattttaaatgcattgacagtggacatggcactgggatgttccacaaacagtatgctgcacattcctgcgatcgcacatgagatcggaatggattttgagattgattttgccaatccgatcagcgagaaaactccgaatctgtgccatcttgctccggcaggacatacatacatggaagatctcaacgaggccggcggagtttatgcagtgatgaatgagctgaacaagaaagggcttcttcatacagaatgtatgactgtgaccggaaagacactgggagagaacatcgaaggatgtgtcaataaaaatccggaggtgatccgcccgattgacaatccgtacagtgagacaggcggtctggcagtactcaagggaaatctggcgccggacggaagtgtggtaaaacgttctgcagtctgtgcagagatgctggtgcatgaaggacctgcaaggatttttgagagtgacgaagaagctacagaagcgattaaatccggaaagatcaatccgggagatgtgatcgtgatccggtacgagggaccaaaaggaggtccgggaatgcgtgagatgctgaatccgacttctgcgatcgcaggatatgggcttggatcttcggttgcgctgatcacggacggtcgcttcagcggagcatccagaggtgcatctatcggacatgtgtcaccggaagcggcagttggaggaccgatcgcgcttgtcgaagaaggggatatcatcaagatcaatattccggaattaaaactggagctggatgtatcagaggaagaactggaaagacgtcgtgctgcatggcagccaagggagccaaaggtcaagacaggatatctggcaagatatgcgtctatggttacctccggaaacagaggcgcaattctggacatcccgaaaaataattaggaggagagcatcatgcagttaaatggagcagagattgtgatcgaatgtctgaaagaacagggtgtagatactgtattcggatatccggggggagcaattttaaatgtatacgacgctctctatgagcatagtaatgaaatcaggcatatcctgacttcccatgaacagggtgcggcgcatgcggcagacgggtatgcaagagcaaccggcagggtgggagtgtgtctggctaccagcggcccgggggcaacgaatctggtgacaggaatcgcaacggcctatatggattccattccggtcgtagcgattacctgtaatgtaggggtttccctgcttggaaaagacagctttcaggaaatcgatattgcagggatcaccatgccgatcaccaaacataactttattgtcaaggatgtggaaaaactggcagagacaatccgcaaggcattccggatcgcgcgcagcggcagacccgggccggttctgatcgatatcccgaaagatattacagcaaacgtgacagaatatcttccccgggaagcagagttcccgccgagaaagacggaaaccatcacagaggaggcactttcacgtgctgtggagatgatcgaagcatcccaaaagccgtttatttatgcagggggcggcgttgtcctttcgggggcgagcagagaattgcgtgaattcgcagaaaaggtggatgctccggtgacagatactctgatgggaaagggagcatttccgggaacagatccgcgttacacagggatggtcggaatgcatggaaccaagacatccaactatggagtcagtgagtgcgatctgttgatcgcggtaggagccagatttgatgaccgtgtaacgagcgatacagaaaagtttgcgaagaatgcacagattttgcagattgatatcgatccggcagagatgaacaaaaacgtgttgatcgatcatggaatcgtcggagatttgaaagaagttttaatgcggttgaatgcaagacttgaggaacagtcacatccggagtggatggaacagattgcagcgtatcagaaagaatatccgcttcagtatgaggatggaaagctgaccggtccgtatatcgtagaagagatttacaggcagacaaaaggagatgcaatcattacgacagaagtaggacagcatcagatgtgggctgcacagtattataaatataaagagccaaggacgctcttgtcatccggaggacttggaacaatgggatatggacttggcgcatccatcggagccaaaatgggctgtccggaaaagaccgtagtcaatatcgccggagacggatgtttccgtatgaacatgaatgagatcgcaacagctgcgagatatcagattccgatcgtacaggtcgtggtgaacaatcatgtgcttggtatggtacgccagtggcagaatctcttttacaatcagcattattcccagacaatcctggatgatgcggtggattttgtaaagctggcacaggcgcttggagcagaaggaatccgtgtgacaacaaaagaagagtttgcagacgcttttgcaaaagcagtaaagatgcagcgtcctgttgtgctggactgccagatcgaccaggatgacaaggtgtggccgatggttgcgccgggagctgcgatcagcgaagtgtttgatgagatggatttgaacgaagaataaattttctttgtttcaatataaaaatgaaattcaggaggaaaagaagatgagtagagtgtacaatttttcagccggaccggcagtgctgccggaagaagtgctaaaagaagcagcagatgaaatgttagattacagaggaaccggaatgtcggttatggaaatgagtcatcgctcgaaagccttcgagacgattattcaggaagcagaggcagatctcagagagctgatggatattccggacaattacaaggttttatttttgcagggcggagcatctcagcagtttgcgatgattccgatgaatctgatgaagaaccgggtggcagattacattgtgaccggtcagtgggcaaaaaaagcagcggatgaggcagaaaagtatggaaccgtaaaccggatcgcatcttctgcagacaagactttttcttatattccggactgttcggatcttccggtttcagaagatgcagattatgtatacatctgtgagaataatacgatttacggaacaaaatttaaagaactgccgaatacaaaaggaaagacgctggttgcagacgtttcttcctgtttcctctctgagcctgtagatgtcacaaaatatggagtgatctatggaggcgtacagaaaaatatcggaccggcaggtgttgtgatcgtgattatccgggaagacctgatcacagaagatgtgcttccaggcacaccgacgatgctgacatacaaaacgcatgcagatgcggattctctctacaacactccgcctgcatacggaatatatatttgcggaaaagtgtttaagtggctgaagaagatgggcggcctttctgcgatgaaagagaaaaatgaaaagaaagctaaactgttgtacgattttctggacgaaagtaagttgttcaaaggaaccgtggagaaaaaagaccgttctctgatgaatgttccatttgtgacaggagacaaagatctggatgccaaatttgtgaaagaagcaaaagaagccggactggaaaatctgaagggacaccgtactgtaggcggaatgcgtgcaagtatttacaacgcaatgccgtatgaaggagtagaagctctcgttgcgtttatgaagaagtttgaggaggaaaatgcgtagtatgtatcagtatcattgcctgaatccaatctctcagattggactcgataaatttacagagaactatcaaaaaacagaggctgcagaggcggcagacgcaattttggtcagaagtgcatctatgcatgagatggaactgccggagaacctgaaagttgtggcaagagcaggtgcaggtgtgaacaatattcctctggatcgttgtgcggagaaaggaatcgtagtattcaatacacccggagccaatgcaaatggtgtgaaagaactcgtaattgcaggaatgcttctggcagcccgtgacattatcggaggtatcaactgggtgcaggagtacgaagaagacggagacatcgcaaaaatcacagaaaagaagaagaaagcttttgcaggaacggagctggaaggaaaaaaattaggagtgatcggtctgggagcgatcggagttctggtggcgaatgcagcgacacatctgggaatggaagtatatggatatgacccgtacgtatccgtagatgcggcatggaagctttccagaaatattcatcatgcaaaatccgtggatgaattgtacaaagagtgcgattatctgaccgttcatgttccggcactggacgatacaaaaggaatgatcaacaaagacgccatcagtctgatgaaagacggggtagtgatcctgaattttgcgagagatgtactggttaatcaggaagatatcgtggatgctttagtatctgagaaagtgcgcagttatgtgacggacttcccgacaaaagagatcgtaggtgtcagaggcgcgatcgtgattccgcatttgggagcttccacagaagagtccgaggataattgcgccaaaatggcagttgcagaagtgatggattatctgcagaacggaaatattacacattctgtaaattatccggactgcgatatgggagtgaaaggaagcggagcaagaattacaatcctgcaccgcaacatcccgaatatgctgggacagtttacagcacttctggcaggcgagggaatgaatatttccctgatggcaaataagagtaagaaggaatatgcttatacgatgatcgacgtagaatccgaggtttccggacagattgcgaaagcactggaagcagtagaaggtgttctgaaagtaagagtgattgtgtgagaaaaaggcagatgttatctgattgaaaggatcagggcatctgccttttgcagttatagtaagaaaaattactgttgacaatacatgtataagtgtatacaattatacaagaacttttgttaagtagagtgttaaagagtggacggaggagaaaatcatggaaaatagaaaagtacgtttgaatcagcacacaaatcttctggaactggaagaacacatgtatccactggtggatgtagatacgccgaatgtgttccggaatctgttccattatgatgaaatcccaaagattgcattcaatgaccgtattgtgccgcataatatgccggatgaaatctggatcacagatacgacatttagagacggacagcagtccagagctccttatacaacagagcagattgtgacgatttatgattatttccatcgtctgggaggtcctaacggaaagattcgtcagagtgagtttttcctgtacagcaagaaagatcgggatgcggtctacaaatgtctggagagaggatatcagtttccggaagtgacaagctggatccgtgccagtaaaaaggattttcagctggtaaaagatatcggtctcaaggagacagggattttggtcagctgttccgattatcatattttttacaagctgaagatgacgaggcgggaagcgatggaacattatttatctgttgtgcgtgagtgcatggaaaccggagttcggccgagatgtcatctggaagatatcacacgttctgatatttacggttttgtgattccgttttgtctggaattgatgaagctgatggaagagtatcagatcccggtcaagatccgtgtctgtgatacgatgggatatggggtgaatttcccgggtgcagtgattccgcgttctattccgggaatcatctatggtctgatgacacatgcgggcgtgccaagtgaactgatcgaattccacggacacaacgatttctataaagcagtcaataattcgacgacagcgtggctttacggagcctgtggagtgaactgttccttgtttggtatcggagagcgtacgggaaatacacctttagaggcaatggtatttgagtatgcacagcttcgaggaacactggatggaatggatacaacggttattacagagctggctgaatattatgagaaggagatcggatacagagtgccgtcgaggacaccgtttgtcggaaagaattttaatgtcacaagagctggaatccatgcggatggaatgctcaaaaatgaagagatctacaatatctttgatacagacaaattcctgaaccgcccggcgctggtttctgtttccaatacatccggagcggcgggaatcgcctactggatcaatgcctactataaacttccgcagggcagtcaggtggataaaaattcagaactggtcagccgattgaaagagtgggtagataaggagtatgaagaaggtcgcgttacagtcttgacagatgacgaattaattgccaaaatagatagtatatgtaaggaactgcatataaaattgtagctgggaggctgacagatagaaaatgggcgaatatcaggataattctctgggaagccgtgtgttccagagacttcgcgaagacatactgagcggaaaatataaagagcatgatgaactgcgggagaatacactcggaaaagagctgggggtaagccggacaccggtcagagaggcactcaggcagctggagctggaaggactggtcacgatcgtaccgaacaaaggagcgtatgtgaccggaatttcatccaaggatatcagagatatctatatcctgcgttctatgctggaagggttgtgtgccagatgggcaacagagcatattacggaggaacagctggatgagctggaagaagtgattcttctatcagaattccatatgaaaaaagtaagtggaaataatgcagaccaggtgacagatctggatggcaaattccataagattttgtatgaagcatcggacagccggattttaagccatgtcctgatggattttcataaatatgtgcagcaggcaagaagaaactctgtcgtttcagaggagagagccagaaagtcgatcagagagcacaagcagatccttcgtgcgatccgagacaacgatgcagatctggcagagcagcttgcaaacgaacacatcctgcatgtgatgcagaatttgaaaaaacagggatacgaagaaatttaggaggatatggaacatggaaaaaattaagatgaccacaccaatcgtggaaatggacggggacgagatgacaagaattctctggaagatgatcaaagaagatcttctggagccatacattgacctgaatacagaatattatgatctggggctggagcaccgcaatgagacgaacgatcaggtgacagtagattctgcaaatgcgacgaaaaaatataaagtggcagtcaaatgtgcgacgatcactccaaatgcggcgcgtatggaagagtatgatctcaaagagatgtggaagagtccaaatggtacgatccgcgctattttagacggaacagttttccgtgctccgattgttgtaaaaggaattgagccttgtgtaaaaagctggaagaagccaattacgatcgcaagacatgcatatggggatgtgtataaaggatccgagatgaagattccgggtgctggaaaagtggagctggtctacacagcagaagacggaacgcagacaagagagctggttcatgagtttacaggcgcaggaatcgtacagggaatgcataatgtcaatgagtcgattgaaagttttgcaagaagctgtttcaattatgcactggacacaaaacaggatctctggtttgcaacaaaggatacaatttccaagaaatatgaccatacatttaaagatattttccaggaaatctacgatgcagaatatgatgagaagttcaaagcagcgggaatcgaatatttctatacattgatcgatgatgccgtagcgcgtgtgatgaaatcagagggcggatttatctgggcatgtaagaactatgacggtgatgtgatgagcgacatggtgtcttcagcatttggttctcttgcaatgatgacatcggtattggtttctccggaagggtattatgagtatgaagcggcacatggtacggtacagcgtcattattacaagcacttaaaaggggaagagacttctacaaactctgtggcaacgatctttgcatggtccggagcgctgagaaaacgcggagaactggacggaaacaaagaattgatggagtttgctgacagactggaaaaagctacgatcgatacgatcgaagcaggagagatgacaaaagatctggcactgatcacaacaattgagaatccgacggtcttaaacagtgaaggatttatcaaagcaatcgcgaagagattgtaaaagaaaatagaaaagtggggtgaaaaatcttacatcggattttttaccccgtttttttataccgtgggttagacggggatatttttgcttcttaattttctgatatatcttaccaataaagtaacacagataaagtcaatgacaacggccgcgataatagactgcataccgtaataaattccggcggtttctgcaatttttccgatgatcgaaggcatcaggatcgatccgaaactggcaatcgtcaaaatgaagctccatgccagagaatatttttggataatggttccggcaaaggatactgtggtcggatacagtcctgccatgctgaacccaaagcccatgataccgacaaggatcagtggagtggacgtactaaataaaagcaggatgaaaaagccgaccagtccaaatcccatgataagcaagagccattctttctggattttggaagacagccatgcgcacaaaagccgtccgaccaggatcatgatccagagaacgctggctgttacctgggacagagaagccggcagtaatccggtgtctttgaagtacgtgatcatccatccgatcacaccctgctctgcacacagatagaaaaataaagtcagtgtacaaagataaaataatggttctttaaaaaaggcgaatccggcagttgtcgttttcgtttcttttttaactgtatcacttgaaactggaacgataaaatataagatccagcttaaaatccccattgcgagcatgaaataacatgcatagatccagttggaagcatctacgcttgtgagtgcaagcagcaacagtggaaatacgaaagcgccgatcgcaaacatggcgtgaagtccatttaaaagcgacgcttttccaggggcaagctcattgatggactggttacaaaaattgctggtagctccccgcgccataccggtaagaaagaatgccagagccaacagataattgttgtctgaaaaaataatcaccagataggacaaggcaaaaaaagcgttgaacaaaagaatgctcttctttcttccaaggacagcgggaagtgcgccggaaatgaaaccggaaatcagatttcccacagagtggaggcttaagatcattccacagaatgcatattccagtccccggctatcccggatatagggcagcaaagacccgatggagagtgcaagcattccgtttatgataaagactccgtaattgcataaaagttgtttgttttgtgttttgcttttgaataattgtatcatgttttccctttcctcccagaatacaaaatgcaatatagtctaaaacaaaaaaacagatttgtaaagtctctattttttgttatgataaatgaaaaagttgtaacattccgtaaagaagcgcgttattagggtgaaaggagggggatatgtggaatttgaagaaatttattaccgatatttcagagatgtgtttcggtatatccgcagctttacaccggatgaaataacgtcagaagaggtgacgcaggaaacttttgtaaaagcattgaaatccctgcaccagtttgacgggaaaaaagatattcgggcatggctctttaccattgcaaagcatacgtatttttcttattgcaggaagaaaaaatgcgagatcaattttgcagaatgtgaaaattcagcagatacaaaagttgaatttgtagaaaatctgatcgatgaagaacaggcgtttctgatccatcagtttctgcatactatggaagagccatacaaagaggtgttcaatctgcgggtgttcggagaactttcttatgaaaagatcgggatgttgtttggaaaaagttccgggtgggcaagagtgactttttaccgggcaaaaaagaaaatcgaagagtatatggagggtcagaaatatgagtaagatcagttgtcatatcatacaggatattctgccgctgtatgtggacggaattgtaagcgaagatacaaaagagatggtggaagagcatttgcgggaatgtgaaagctgcagaaaagaagcagagcatatgcaggagcggatcgtgcttccgaataagaaggaattttatcagaaagagcaggaaatgctgcagaaattcaagcgcagactgatcaatcggagagttctttctgcaatactgggcgccgtgtttgtatgcgctttgctggcaagtgggtatacaattctgatgatccccaaagaagcaatcccgtttgatcccgataaaatgaaagtggagattgtgggagaagacgcatatttatcgtatcagggcgacgatctggcagggtcgttttttgcatatccggtcaaagtccgggatggaaaccgggaaaaagaagtggcgcgggtgtatctggaaaagaatctgtggtctgcttatatacagccgcatttacagggaaagcaagaagagatgatctatctttgtaaagcttcggatatggatgcgttatattatggagaattggatatcgaatacggagaaaatatagcagagtttccagaagagatggaattgatctggcagtcataaaacgctggaaaagaaagacgggaagaacctgcagattattctgcaagttcttcccatttttcatacaattcttccagttcattgttgttggcgtctttttccagcgcaagttcctgacatttgacagagttcgagtatacctcttcctgtgtcatcagcatatcaatttcttcatttcgttcttccagaacagcaattcggtcctcggtctttttcagttcatttttgcgtttccgctcttttgcctgctgttctttttgttcctgccaactgagtttggaatcggaaggcgcttcttgtgaagtggacaaaacaactggattttcagcagtgatcggagctgcataggcagcggtcagttcttcttttttctccagataatagtcatagtttccgatatagttgacaaaggtctggttgaccagctccagaatcctggtggcagtctgattgatgaaataacggtcgtgggatacgtacaggacggtgcccgtgtattcgttgagtgcctgttccaaaatttctttggaagtgatatccagatggttggtaggctcatccaggatcaaaaagtttgcttccgacagcatcagctttgccagggaaacgcggcctttttctccaccgcttaaatcccggatcagcttatagacatcgtctccggtaaactgaaaggctgccagggtattacggatctgggtgttagtgagtgttggatagtcatcggaaatttcatcaaagatcgtcttttcattgtgcaggacatgatgctcctgatcgtagtatccaatctgaactttggaacccagtgtgaaacttccggtatccggttctacgacctgattgaggatcttcagcagagtcgttttgccggttccgttgtctccgatgatggcaacatgttcgcctcttttgatctcaaaactgatatctcgaaacagcacttgactgtcaaattgttttcccaatgattggatgctgagtacatcgtttccactgatttcggaaggttccaatgtaaaatgcatttcttttacagcttctgctggtttctccacaggggtaatcttggaaagcagtttttccctgctttccgcacgcttgatggatttttcccgattgaatgagcgcagcttttcaatgacggcttcctgatgtttgatttctcgctgctggtttaagtattcttttagctgggcatctcggatcatctgctttttctgcgcataggctttataattgccatcatacatgcgtacagaaccatgctcgatctcgatcacttttgtgaccacacgatttaagaagaaccggtcatgggaaacgatcagaacggctccgggatagtttaaaaggtaagtttccagccagctgatagagtttaagtccaggtggttggtcggctcgtccaacaacagaatatccggtttggtgagcaaaagtttacccagtgacacacgggtcttctgaccaccggaaagggtgtcggtgggtttagaaaagtcttcttccgtaaacccaagacctttgagtacacctgtgatctcactttcgtaggcatagccgtttttgttttcaaattcggacatcagacggttgtatgtattcaatcgggtattcagttcgtctccggtgagagattttaactcaagttcaatagaacggatctgctcttccagggagatgatatcggattttgcagttttcaattcttcatagatggtattttgggtatccagattctggtgctgcgccaggtatccaagggtcttgccctttgtcagaatgacatccccgtcatccagagggagttctcccacgatcattttaaaaatggtagattttccggcgccattgacaccgacaagggcagctttctcacggtcttccacatgaaaagagccatcccggacaatgagatggtcaccgaatgatttattcaaattatgacatgcaagtatcataacattcctcctgtatcttcacaatcactgattttttcaattagttctatttcattatagcgaaaacccagcaaaatacaagggtttccggttacaaggtaaaaaatcagaggatggactgtattgtaggagcagacaaacaatgttataatgggaaaaacaggcggggaagaagtctgtttgttaaaatacgaaattcaatgtgccaaatatattatagaaaaagatattatagtccagcggtgtgatgtcaagagatagataataaaaaaatcatatatttttgtataaatctcatgaagacaaaaaacacccacctaagccctgtcgaccaaataaaaaaatgagcagggcatagctcatcagcaagcagatggaatctactttgctggaacatataggcgattgtctttcagcagtcgaaagactaaacgcacaaatttacgggcagttaatgcgagtgcacgtttgtgttggcatctgttcacctctttatatttgaggtggtagaagtcgctgtattctttgtcgcatcttacaagagaaaatgcagcttcatacagataatactttaaaaatcggttgccggaaggaatgagccttgtaacttcggcttcaaaactacctgactggtgttgcttccaggcaagacctgcatatttagcaagtgcagcctgattatcaaaacgattgatatcaccaatttcagccatgattccggctgaatatacaggtccaatacctggaatggatatcaatacatttggcaagagttccatctgggctttgatagctttatcgaactctttgatctgagattccaatgccttcatggaggttatggatatagaaagcacctgattgacagaatcattcaccgttttgggcaaacggtaggaactgcgggcagctttctggatggctttggctactgcatccggatcaggaaaacgattttttcctttttcaatgatgaagtcagtaagctcatgtaagtccatatttgccagtgcttctgcggaatcaaattcatcgtagacagcaagggcagtagtgctgaaggtatcgctgaataccttctcctgtgtcatcgtagaatacttcttgaacagcacattcatgaatcgctgcttttctttgataagattctgaacagcgaagaaacgtgcccgtgtgaggttctggagtgctttgtagcgatagtctcccagatatacctctttgttgattctaccgaaacgcaggcagtcagcaataacaaaagagtccacataatcattctttggcaagtcattgtaagcatcatgaaactttttcacttgcttaggattgaggacatgaatctttctgttaaacggtgccagagtggcatcttcccttaagaagtacacgagattgtctccataaacagaggttgcttcaagaccgatcagaaccgtgtcaagggaatgtgaagttaaagcagaaagaattctttttaccaactgggtagaaccttcatgagaattagcaacagaaaagttactgtgcttatccccattcgggagcattaagtaaacgacattggatttgctgcttacatcaataccgacgtaaagagtgttcattgtgatcaccttctttcgttgtagaataaagtgttcaatcggcttggtaaaacccatgatcatggagcatcgacaccctcgcatataagaatccagcttaagatggacagatgcgaaaccatactgctaaatggtcgtccatgtacttaagcaaacagccagccggtttgaagctaacgtccatgtcaggggaacagactatctatgaagcaaccattactggttcaacaaggagaaaaagaactattacctgattgacactgggacaattatatcatgggctttgctaagcctattgaacagatatttattaagttatcgaggtacatttatgtatctaaaagatattatacgaggaaaaatggaatgaaatacatatttttgcatggattggggcaagttccttcggactgggaggctacaattaagagactggatttggaggtggatgtggactgcccggatttatctgactggctttcgggaaaagaagccagttattttgatttatatcatgaactggagaattattgtgaacagcaagaagttctgcatttgtgcggtctttcattggggggaatcctcgctttgcattatgcagtggaacatgcagagaaagtagcctctctggtattaattggtacgcaatatatcatgccgaagaggttattgcaatttcagaatctgatatttcatcttatgccaaacaggagtttccgcaaaatagggtttgaaaaaaaggattttattaatttgtcccaatccatgatggatttagattttcgaaaggatttagcaaaattaagttgccgggtacttgtgttatgtggtgaaaaggataagataaatatgtctgcatctatagaattaaaacagcagattaattctgcagaattagagattatttcccgtgccggacatgaaataaataaagatcatccgattgaattgggaaaggtgctcagcaatttttatagatgtgtatgctgtcagattgacgctgcatcttgcacatgtggaggccaatccgtttgatctggtttcaaacagcagttttacaaggaaaacagagaaagataaatcaaaataaatttatagattcccaactaaaagtttgacttctctttcacaattctatataataagaaaagattaaatttggaggatacgataagtggaagagagaaaaatatcccgtgcggtcataggcagacttcccagatattacagataccttggagatttgatggaagctcaggtagagcggatttcatccagtgatctgagtaagaagatgcacgtaacagcctcccagattcgtcaggatctgaataatttcggcggattcggacagcagggatacggttataatgtcaaatatttgtatacagagattggtaagattctgggattggacagaaatcacaattttattattataggtgcaggtaatttaggacaggctctggccaattatgcttcttttgagaagggtggatttcttttaaaagggatttttgatgtgaatccacgtttggaaggagttgcgatccgggggattccagttcgtatgatggatgaactgcaggagtttcttcaggagaatgagattgagattgctgcattgacgattccgaagtcaaaagcaaaagaagttgcagaacttctggtagacaatggtattcaggcaatctggaattttgcacatacggatctgaatttaccgaaagatgtgatcgtagaaagtgtgcatctgtcggacagtctgatgaagctgtcatataatgtcagccgtcatcaggaaggaaagaataagtgagaataacccagccaatgtgcaaagacgtgtgatcggattcttctgatcgcacgtcctttcttttgaatcataagaaaggatgaaaaatcatgagatatttaccaaatggaacatggatgcaaaaggcagatgaagatacgatacaaagaattggaatcccatcgctggtactgatggaacgtgctgctctaaagacagtggaagtgatgaaggagagacagatcgctctggaacaatgtctggtagtatgcggcagcgggaataatggaggagacggatttgcagttgcaagacttttgcatatggaagggaaaagagtatgtgcagtatttgtgggcagtgaggcatccatgagtgaagagtgcaggatgcaaagggagattgccgggaatctgggcgtgcagattgtcacagatattccacgggaagaatatactgttgtgatagatgcggtgtttggtgtgggtctgagccgtccggttacagggcgatatgctgaagtgatcaaagccatgaatcaaaagaaagggcagaaagtagcggttgatgttccctcggggatcagctcttttgacgggagtgttctgggagtggcgtttcgggcggatctgactgtgtcgtttgcatgcgaaaagctggggagtgttttgttcccgggatatgaatacagcggggaagtagttcctgcagagattgggatcgcgaccgatatttttcggaaacagacggatatctgttatacactggacagggaagatctttttgaaatgcttccaaaacggaagaagaattcccacaaaggaagttatgggaaaattttgatgatcacagggagcaaaggaatgtccggcgctgcgtatctgagcgcaaaatctgcatatatcagcggctgcggtctggtgcagatttatacagaggagacgaaccgggtgattctgcagcagcttttgccggaagcgattgtgtccacgtataccgtatatgaggaagaggcgcttgctgcattgctgaaatgggcagatgttgtctgtattgggtgcggacttggaaaaagtaaggtttctgagcagatcttagaatatgttttgagacatctggaaattccatgcgtcatagatgcagatggattgaatcttctggcacggaaaaaagaactgttgctgcaggaagcaaaagagatcattctgacgccacatatgaaagaaatggcgggaatgatcggatgtacggtttccgagcttgcggagagacgttttgaaaaactgcagaaatttgttggagattacggcgttgtgtgtgccttgaaagatgccaggactctggtggcagcgcagggcaggcagatgtttttgaataccgcaggaaacagtgcgatggcaaaagcgggatccggagatgtgcttgccggtgtgatcgccggacttttagcacagcatatgtcagcatatgatgcggcggttctgggtgtatacctgcatgcatgcggaggggatgaagccagaaaacgctgtggagcctacagtgtcttggcacaggatctgacagaaggaatcaaaatatgtatcaaagagacaaaaaggggagagaattgatggaaaaacacagcagagtgtatgcagagatcgatctggatgcaatccgttataatatggaacaaatgaaacagcgagtcggtgcagatgcacagtttattgcagtggtaaagacggatggatatggtcatggagccattcccattgcccaaatgttggaaaaagatccttccgtgtggggatatgcgactgccacactggaagaagcggtggatctgcatcatgcagggatccaaaaaccaaccattgttctgggatgtgtgtttccggatcagtatgagacaatgatacgggaagaagtgcgtgcgacgatatacaccatggaaatggcgaaagagatgtcagaaatggcagaaagacttggcaaagatgcctatttccatataaagatcgatacagggatggagagacttggattttcggtgaccgaagagagcgcggacatcattgcagagattgaaaagcttccgcatgtaaaattagaaggaatgtttacgcattttgcaaaagccgacgagaaagataaaacattctcagaaaaacagtatgagaagtttctgtggatgaaagaggcagtgaagcaaagaggtgttcagatttccagatttcattgtgacaatagtgcggggattattggttttccccagtggagacaagatctggtccgtgcagggatttctctttatgggatgtatccttctgatgaggtggaaaaggatgcagtgcagttgaagccggcgcttcgcctggtcagtcatgtcagttttgtaaaagaggtggcgaagggcgtttccatcagttacgggggaacttttactgcggagaagaatctgaaagtggctacgatccctgtcggatatggggacggatatgccagaggactttccaatcaggcagatgtgctcattcatggaaaacgggcgcggatcctgggaagggtctgcatggatcagtttatggcagatgtgaccgatattccagatgtgaaatttatggatgaggtggttttgatcggaaaaagtggagaagaggagatcacagtagaagaattaagtgaattgagcggacggttcaattatgaatttgtatgctgccttggcaagcggattccaagagtttataaaggcggcaatctgtaaagaaaatatcaacagatgcatacatccgataaaagcgggaatactcaagtatacttccctgagggggagaaaattgaagtataagaatcggagtgtgaatagaacgtgacagtcagacgaggggatatttattatgcggatttaagtccggtgatcggttcagaacagggcggtgtgcggccggtgctggttatccagaatgatgtgggaaataagcacagtcctacagtgatctgtgcagcgatcacatccagaatgaacaaagcaaagctgcctacacacattgaaatcagtgcaaaaaaataccggcttgtgaaaaattcagtggtacttctggagcagatcagaacattggacaaaaagcggctgaaggagtatatctgccatgtggacggaacatttatggaagaagtcaatgaagcgatccgcattagcctggaacttcctacataacggaaatgggcgggaaatgtcagcgttacaactttacagaacgaaaaaagagtgataaaatggaacaacgagtttatgagataaaaggagaattgagcaatgtcaggacattcaaaatttgcaaatattaagcacaaaaaagagaaaaatgatgcagcaaagggaaagatctttacgaagcttggtagagagcttgcagttgcagtaaaagaaggcggcggtccggatccggcaaacaacagccgtctgcgtgatgtgatcgcaaaggcaaaagcaaataatatgccgaatgatacgatcgacagaaacatcaagaaagcggcaggagaaggttcgggagacaactacgaacacatcacatacgagggatacgggccaaacggaacagcgatcattgtaaagacactgacagacaacaagaaccgtactgcatccaatgtaagaaatgcattcacaaaaggaagcggaaatgtaggaacaccgggatgcgtctcttttatgtttgatgaaaagggacagatcatcgttgcaaaagaagactgcgatatggatgcagatgaactgatgatgatggctctggactttggggcggaagatttttcagaagaagaggagagttttgagattctgactgctccggaagatttcagtgaagtgcgcctgaaattagaggaagcaggaatcgtcatggcagatgcggaagtgacaatgatcccgcagacttatgtggagctgacaagtgaagaggatatcaaaaatatccagaaaacactggatcttctcgatgaggatgatgatgttcaggacgtgtaccacaactgggatgagtaagcacaccttacatagattttaaatagtgataatgaaaccataataaacatacattagaataaaatcagaagttgtttatcaatggtttggagggatcactatggtaaaagaaagaagaagtgcaaaacggattaaatatgatatggttcgtgtttactccaaaatggagactcatgtagacggaaaagcaaaaagtattttcaaaagaaagccttatgctctcgcaaaataaggataaagaacaggtctgtcggtatctggaaatccaacagacctgtttctttatgcaaaaaaattgaaatgcagtatcagatatgctatactgaacaatggtataaaaggaaatacaacaaaaagaggaatgccaatgagtcagaatagcttacagaatgatttgattgttttgtatgaaaaaaccagagaaaaagtacggggatttcagaagaaaacatatcagtcagatatgggaattttaaaagaagaaaatcagacactgctggaatgcgtgaaagaaacgattgaaaaatctgaaaaatgtatgcaggaagttgcggggtatgttccggaatatgcatcggatatgctctctcagattgattccaagcgaaaaagagaagcggcagttattgatcacaacatggccatggtagctttttttgttccgctgatgggggaaattcagagtacgcagacgaagatatttacggagacaatcgtggagatatggaatcagaaggtgcctggcagcaaaatcggacactcggatgctgcaagtattgagaatgggtttaaaaaaggagttttctgttatattacaactgctgtctgtaagagtctgaacaagccggatgactgctatgaactgaatcttttgagagaatacagagatcagtacctgatgaggacaaaggatggagagattcttgtaaaagagtattataatattgctccgacaattgtaaagaggattgaccgcagcccggacgcatcagaaatttatgcggatatctgggaaaagtatttaaagccgtgtgtacgcctgattgaagcgggcgaacaagaagaatgcagagaattgtacacaaagatggttcgttctctggagaagaaatatttgtattcagtaggaggagagaaaaatgagtaattacaaaacagagacaaaatgtatacaatccggatatgaaccgggtaatggagaggcgagagttcttcctatttatcagagtacaacatttcgatatacaagcagtgaacagatggggcgtctgtttgacttagaggagtccggttatttttataccagacttcagaatccgaccaatgatgcggttgctgcaaaaatctgtgatctggaaggcggagtggcagcaatgctgacatcatccggacaggcagctaatttctatgcgattatgaatatcgtggaagcgggagatcatattgtctgtgcatctgctctttacggaggtacctacaatctgtatgcccatacgatcaaaaaaatgggtgtagaagctacgtttgtagatcctgagtgtacgcaggaagagctggatgcagcatttcaggaaaatacaaaagcagtatttggagagacgatcgccaatccggccctcgttgttctggatctggaaaaattcgcaaatgccgcacatgcacatggggtgccgtttattgtggataatacatttgcaacaccgatcaattgccgtccgtttgaatggggcgcggatattgtgacacattctactacaaaatatatggacggacatgccgcttgtgtgggcggtgcgatcgtggacagcggaaattttgactgggaagtacacaaagaaaaattcccgggactgacaactccggatgagacgtatcatggaattgtatatacagaaaaatttggcaaaggtgcgtatattacaaaagcaactgcacagctgatgagagatcttggctctatccagtcaccgcagaatgcatttctgttaaacatcggactggagacactgcatttaagagtgccgcgccactgtgaaaatgcagttaaggtggcagagtatctgaaaaatcatgagaaggtggcatgggtgcgctgtccatcacttccgggagacaaatattatgatcttgcgcagaaatatatgccaaacggaacctgcggtgtcatcacattcggtctcaaaggcggcagagacgctgcagttgagatgatggatcgattaaaaatggtagcgatcgtgacacatgtagcggatgccagaagctgtgttcttcatcctgccagccacacgcatcgtcagatgaatgacaaagagctggtagaagcaggcgttcagccggatctgatccgtttcagtgtgggaattgaaaatatagaagatattattgcggatgtcgagcaggcacttcgttaattcaagatggtatggatgtatacaagaggcatccataccatttttgcgtgaaaaatcatcattttccgtataaacaagggcggttgatcgaatactaaagtatccggctgtccaagtacagacctgaaaatagagaaaagaaggtagaagatcatggaaaatgaggagaagcaaagacaacgtctggataaaaacgaagagattaaagagaccggcaccttaaatctgaatggaaacgggcacaaagcgaacatacagcttctgacgatcattggagagattgaagggcatgaggctgtttccggaaacacaaaagccaccaaatatgagcatttgattccaagactggcagaggtggaggatgacgatgaagtggatggagttttgattttactcaatacactgggcggtgatgtggaggcagggctggcgatcgcggaaatgatcgcatccttaagcaaaccaacggtctctctggttctgggaggaagccactccatcggcggaccgcttgcagtttccgcagattattcttttattgtgccgagtggaacaatgatcgtgcatccggtgagatcctctgggatgtttattggagtgattcagagttatcgtaatatggaaaagacgcaggatcggattacccggtttatcgcagctcattcgcagattaccaaagaacgtctggaagaattgatgctggattccacacagttggtaaaagatgtcgggactatgttagaaggggaagatgcagtcagagaaggcatgattgatgaggttggaggaatcagcatggcattgaaaaagctgcgggaaatgatccggcagaaaaaatgttaatgacacacttttcaattgatgttatactagatgtagtatgtgtaattatcaagggggaagtattatggctgcaaagtcaacaaggaaaaagaaaactacaagaaaaaagtcatccaaaaatcaggcaagtacatccctgaacagtgaaattttgattctggtcatgtttgcggtctgtgtgctgatgcttttaagcaattttggagtcatagggattgcaggcagtgcgatctcttctgtactctttggttttttcggagtgatggcatatattctgccgtttctcttatttggcgtggttgcttttggaatttcgaataaaggcaatacacacgcctacataaaaattgcagcatgtgtggccttattgtttgcaatctgtgcatttttccagctggtgatgcatccttttgatgccaaagaaagtctgtggagctattatcagtatgccagtgattacagaaaagcgggcggtcttacagggggctgtctggtgaagattctgtgtccgtttattggtgtggtaggcgcttatgtggtactcgttgtacttatggtaatctgtgtgattctgatcacagaacgttctctgcttgcacctcttggaaaaggaagcaaaaaggcgtatgcagatatgaagcgccggcagggagaagcatctgcccggcgtgcgaagaacagagaagaaaaacgaagacaggcagaagaagcaaagacagaaccgaatgattcttccagaagaagtgatcataaagtatcgggtgtttcttttgcaacaacgctgcaggcccaggaaagtgaagtgccaaaggagacaacagcgaaaaagcgtaaaaagaattcttcaggaaaagatccggatatgcgggaactgactgtttcacaggaatcggatttttcagagccactgccgtctccatttgaagattttgtgatcaatcgtccggaaagcacggcgtcggatgcgagcgcagtggatactccattatgggagaatgaaccagaaccgccagaagagcgtaacatgccgcaggaggatatttcggaagagtcagtccgtacaaggaagaagaccaaggcgagtgcggcagctgtggaagcagagactgttcaggtagaacagagtatcaaagagcaggagcagcagccgaagaaagtgtacaagattccgccaatgaatcttctgacaagagggaaaaagggcggtggagactcggatgcccagctgcgcgccacggctcagaaactggagcagaccctgcagaatttcggggttcgcgttcatgtaacaaatgcaagctgcggaccgtctgtgacgcggtatgagctgcagccggaacaaggtgtgaaggtaagtaagattgtaggtctggcagatgatatcaaattaaatctggcagcggcagatatccggatcgaggcgccgattccgggaaaagcagccgttgggattgaggtcccgaaccaggagaatacggcagtgatgcttagggacctgttagaatccggggaatttaaaaattccacagcgaatattccgtttgccgtgggaaaagatatttcaggaaagacggtgatcgcagatatcgcaaagatgccgcatttacttgtggcaggagcgacaggatccggaaagtcggtatgtatcaatacgctgatcatgagtattttataccatgcagatccggaagaagtaaaactgatcatggtggatcccaaagtagtggaactaagcgtctacaatggaattccgcatttgctgatcccggtcgtgacggatccgaaaaaagcagcaggcgctctgaactgggcagtcgctgagatgatgaagcggtatcagctgtttgcccagcagaatgtccgggatctgaaaggatacaatgaaaagatcgcgcagatgacagaagaaggagttccgaaaaaattgccgaagattgtgatcattgtagatgagctggcagatctgatgatggtggcgcccggggaagtagaaggcgcgatctgccgtctggcgcagcttgccagagcggcgggactgcatctgatcattgcaacacagcggccttcggtgaatgtcatcacaggtctgatcaaggccaatatgccgtccagaatcgcattttctgtctcatcaggagtggattccaggacgatcattgatatgaatggagcagagaaactgcttggaaagggagatatgctgttttatccgacaggatatccaaaaccggtccgtgtgcagggatcctttgtttcagataaagaagtgcagaaggttgtggactatctcatcgaacacaacggaaatgcctcctacagtgaagaagtggaggagcacgtaaattccgatctgccgtcaccggttccggggatacagggagcaggggtgcaggataatgcaaatgagcaggatgcatattttgcagatgcaggacggctgatcatagaaaaagaaaaagcatccattggaatgctccagaggatgtttaaaatcggcttcaaccgggcagcccggattatggatcagcttgccagtgcaggagtggtcggagaagaagtcggaacaaaaccaagaaaagtactgatgacaaaagaagaatttgaacagtacattcaggaaaatttataatgcagtggaggaagaaatgatgaaaacagatattcagatcgcacaggaagcagaattaatgcacatcaaagacgtggcagcgtctatcggaatttcagaagaggaactggagttttatggaaagcacaaagcgaagctctccgatgaactctgggagaaagtaaaagaccgcaaggatggaaaactggttcttgtgacagccatcaatccgaccccggcaggagaagggaagaccacgattacagtaggtctgggtgaggcatttgcaaaaataaataaaaaggcaatcatcgcactgcgtgaaccatctcttggaccgtgttttggaatcaaaggcggagcagcaggaggcgggtatgcacaggttctcccaatggaagatttgaatctgcatttcacgggagatttccacgcgatcacttctgcgaataatctgctggctgctatgttggataatcacattcagcagggaaatgcattgggaattgacccgagaaatattgtctggaaacgctgcgtggacatgaacgacagagttcttcgcaacatcgtagtaggacttggaaacaagatggatggaatggtgagagaagaccattttgtgatcacagtcgcatctgagatcatggcaatcctctgtcttgcagacgatcttgcagatctgaaacgccgcctgggacgaatcatcgtggcatatacatttgaaggcaatccggtaacagcagacgatcttcaggcaacaggcgccatgactgcattgttaaaggatgcgatcaaaccgaatatgatccagacactggagcacacaccggcactggtacacggcggaccttttgctaatatcgcacacggctgcaacagtgtccgcgcgacaaagctggctttaaaaatcagcgatattacaattacagaagccggattcggagcggatcttggagctgagaaatttatggatattaaatgccgtaaagcgggattaaaaccggacgcagtggtacttgtagcaacagtgcgggcactgaaatacaatggcggagttgcaaaacaggatttgggcgaagaaaatctggaagcactgaaaaaaggaatcgtgaatctggaaaaacacattgagaatattcagaaatacggcgttcctgttgtagtaacactgaattcctttgttacagatacggaagcggaaaatgaatttatccgcagcttttgtgaagaaagagactgtgaattcgcccttgcaaaggtgtgggaaaaaggtggagaaggcggaatcgaactggcagaaaaagtgttggatacactggagaataaggaaagcaatttccatgtactgtatgaggatgaactttctctgacagaaaagatcgagaagatttcaaaagagatttacggggcaaacggtgttgtctatgagccggctgcaaagaaacagcttgcgaagatcgaagagatgggatttgggcatttcccgatctgtatggcaaagaatcagtattctctgtcagatgatgcgaaaaaactgggacgtccggaaaactttgacatccatatccgtgaagtttatgtcagcgcaggtgccggatttgtcgttgctctgacaggtgcggtgatgacaatgcccggacttccgaaagtccctgctgcaaataacatcgatgtaacagatgacggaaaaattacaggactgttttaaaggagtattgaatggcacagataattgacggaaaacgaattgcaaaagaaatcaaagataaattgaaagaagaagtatccgtgctgaaagaaagaggcaccaagatctgtctggcagtgattcaggtagggcaggatgcggcttcttcggtatatgtaaacaacaagaaaaaggcgtgtgcttatgttggaattgagtcggtatcgtatgaattggatgaagatacaacagaagaggagcttgtcaagctgatcgaaacgttaaatcagacggaaaaagtacatggaatcctggtgcagttaccgcttccaaaacagattgatgaagacagaatcatacgtacgatctcaccggataaggatgtggatggatttcatccggtgagcgtaggacgactctggttgggtgaaaagggatttgtatcctgtacaccggcaggaattatacagcttttgaaatattcaggaatcgaaattgcaggaaaagaatgcgttgtagttgggcgaagtaatatcgtgggaaaaccgatggcagcattgcttttgcgtgaaaatggaactgtgacggttgcccattctaaaacggaaaacctcaaagaagtaacacgcagggctgatattttgattgcggcggtcgggcgtccaaagatgatcacggcagagtacataaaagagggtgcagtcgtaatcgacgtggggattcacagggataccaacaaccatctttgtggagatgtagattttgaggatgtgtattccaaagtatctgcgattacaccggtacctggcggcgtaggtccgatgacgattgctatgctgatggacaattgtgtgcagacggcgcgtgactaggaggaacagatatgagatgtgcgcattgtaatgcgattattccggaaggctggatgcgttgtccgagatgtgggaaagacattcagatcgtaccagattataatcctttagagaatgtccttactcaggaagtaaaaggatcggtagaggatgtgacgagacagatgcatacagaggatgttcgcaattttggcagaaaacagaatggatatcagtcaaaggcaacgcgggtgctcagtcaggaagagttgaatgaaatacagaccagaagagagcgtgcagcaaaaaacaggtctcgtgcagaggcaagacgaaaacagcaggagcgaaaaaagcagctgatacgcagacgaagaaaggtacttttgattttattattgtttttactgcttttcggtgcgttgtttggatatattatgtatcagaattcttatgccggcaaagtggcaaaagggtatgatgcattgcagatgaaagaatatcagacagcggaaaaatattttaaacatgcaatcggaaaaaatgcccaaaaaccagaggcatattcaggtctggcagagacctatatggaacagggggaggaagacgaagcagaatccgtatttctctcggcgattgcctcttatccatccaatcaagaattgtaccaggcagcaatccgcttttatgaagagtcaaaacaattggaaaaaattccggaaattttgggagactgtgaggatgaagcagtattgtcaagtttgaaagcgtacatttctacagatcctgtttttagtctggatgaaggtaaatatagcgaagtacaggaagtgacgctgtctgcatctggagaaacgatttattatacaacagatggaagtgatccaatttcggcaagcacagaatatacggaaccgatccttttaagtacagaaggaaaaacgcagattaaagcgattgcctataacgagaagaaaataccaagtttgattgtgtccaaaacgtatgagatcgaatttccggtggcagatgcaccggtcgtcacaccgtctacgggacagtatagcacggtgactcagattacgatcacagtgccggaaggctatacggcttattatacgatcgatggatctgtaccaacaacagaatctatgctgtatacaggtccggttgaaatgccggaggggcagacattatttagtgcagtcctggtaagtaagaccggaaaaatgacgcagattacaaagagaaattatatttatcagccgcagtaatggggctgattttttgaaaaaacaggtgttacaaaaatgcaattggcttttcttacaaaaatagcactggttttttgtgcattatttaacgaaaaaaatcaatagttttgttgtgtgaaaagtttcacagtggtataatgattctagttgaaaacaacagactttaatcaaaggagatgcagaacaatgagcagattttgtttaccaagagacatttaccacggaaaaggatgtctggaagaattaaagaacctgaaaggaaaaaaagcaatccttgtagtaggcggcggttctatgaagcgtcagggatttcttgacagagcagtagagtacctgaaagaagcaggaatggaagtacagctgtttgaaggcgttgagccggatccgtcagtagagactgttatgaaaggcgcagaggcaatgcgcgcgtttgagccggactggatcgttgcaatgggcggaggttccccgatcgatgctgcaaaagcaatgtgggcattctatgagtacccggatgtgacatttgaagatctttgcattccatttaacttcccggaattgagacagaaagcaaaattcgcagcgattccttctacatcaggaacagctacagaagtaactgcattttcagttattacaaactatcagacaggtgtaaaatatccactggctgactttaacattacaccggatgttgcgatcgttgatccggatttggtagctggtcttccggttaaacaggttgcatatacaggtatggacgcattgacacatgcaattgaagcatatgtttctacattgaacggaccatttacagatccacttgcactgcaggcaattgagatggtactggataaccttccggcatcttacaactgcgatatggatgcaagagagcagatgcattatgcacagtgtctggcaggtatggcattctccaatgcattgcttggaatcgtacactctatggcacataagacaggtgcagcattctcaacaggacacattcctcacggatgtgcgaatgcgatttatcttccatatgtaatcaaatacaacgcaaaagatccggttgcagcaaaacgttatgctgaggttgctcgcagaatgggacttccgggaacttctgaaaaagcactcatcaacagtctggttgaaaagatcgatgactttaatgtaaaactgaatattccaaagacactcaaagagtttggagttgaagagaatgaattcaaagaaaaagttgctaagattgcagaactggcagtaggtgatgcatgtacaggatctaatcctcgttcaattgatcctgcaacaatggaaaaattattcacatgtacatattacggaacagaagttgatttttaatcgaatcagactgaccgtttgtgaatgaacgagagggacaggcacagtacaaaaagaagtgtctgtcctcttttagtatgaaaataaaatcacgaacaactattgccattatgccaataatggcgtattattaagaaaggtgatttattacaaggaggaagaacatgtataagattttgaaagcagaaaaattgtctgagaatatttttctgatggacgtgcatgcgccaagggttgcaagtcattgtgaaccggggcagtttgtgattgtaaagatggacgagaaaggggaacgcatcccgcttacgatctgtgattatgacagagaagccggaacgatcaccatcgtggtacaggaagtcggagcttccactgtaaaaatgtcagaactcaaagcaggagattccttccgtgactttgtaggtcctcttggatgtgcttctgaatttgtggaggaagatattgaagaactgaaaaaacagaagatcttatttgtggcaggaggacttggtacagcccctgtatatccacaggtaaaatggctgcatgaacacggcgtagatgcagacgtgatcatcggagcaaagacaaaagacctcgtgatcatggaaaaagagatggaagcagtagcgggtaatctctatgtgacaacagacgacggttcttatggacgttccggtatggtaacacaggtgattaaggatctggtggaaaaagaaggaaaacactatgacaaatgtgtggccatcggaccaatgatcatgatgaaatttgtctgtcttctgacaaaagaactgaaccttccgacgatcgtcagcatgaacccggttatggtagacggtaccggaatgtgcggagcatgtcgtcttcaggttggagatgagatcaagtttgcatgtgtagacggaccggaatttgacggacatctggtagactttgaccaggcgatgaagagaagccagatgtacagatcagtagagggaagagcaatgctgaaattacaggaaggcgatactcatcacggcggatgcggacattgtggaggtgacgagtaatggcaaaaggaatggtgagagtacctgtcagagaacaggatccaaaagtacgtgcaacaaattttgaagaagtttgtcttggatataatcaggaagaggcaatggaagaggcaacaagatgcctgaattgtaaaaatgcaaaatgtatcgaaggatgtccggtatcgatcaatattccggcatttgttcaggaagtaaaggaaggaaatatcgaggaagcatacaagatcatcggacagtcttccgcacttccggcaatctgtggacgtgtctgcccgcaggagtctcagtgtgaaggaaagtgtatccgtggtatcaaaggagatccggtatccatcggaaaactggagcgttttgtggcagattatgcactggagcatgacatcaaaccagaaggtgcaaaagaacagaacggtcataaggtagctgtgatcggttccggaccgtccggactcacctgcgcaggcgatctggcaaagatgggatatgatgtgacggtatttgaagcacttcatgaactgggaggagtacttgtttatggtattccggaattccgtcttccaaaacagaaagtcgttgcaaaagagattgaaaaagtaaaagaattaggcgttaaatttgagacaaacgttgtgatcggaaagtcaacaacgatcgatcagctgattgaagaagaaggatttgaagcagtattcattggttccggagctggacttccgatgtttatgggaatcccgggagaaaacgcaaacgaagtattctctgcaaatgaatatctgacaagaagcaacctgatgaaagcgtttgattcttcttatgatacaccgattgctgcaggtaaaaaagttgcagttgtcggcggtggaaacgttgcgatggatgctgcaagaactgcactcagactgggagcagaagtacatgttgtatacagacgaagcgaagcagagctccctgcacgagtagaagaagtacatcatgcgaaagaagaaggtgtgatctttgaccttctgacaaatccaaagcagatcaatgtagatgagaatggaaatgtcaagagcatgacagtcatcaaaatggaacttggagaaccggatgcatccggaagaagacgtccggttgagattcctggatctgagtatgacattgatgtagatactgtgatcatgtcccttggaacttctccaaacccattgatttcttctaccacaaaaggcctggaagtaaatcgcagaaaatgtatcgttgcagaggaagaaagtggacagacctccaaagaaggcgtatatgccggcggagatgctgtaactggcgctgcaacagttattctcgcaatgggtgcaggaaaagcaggagcaaaaggaattgacgagtatctgaaaaacaaagaaaaatagaaacagagcaaactagcaggcaagacctgtaaaagagaactccgcatggattcttcttccgaatattcgggacctgatgatatgcggagtgttttgtatgtataaggagagaaaaagaatgacaaaaaaagaacttgccctggaataccataaaaaagggtataactgcacacaggctgtagcgtgtgcgttttgcggggaatttggcgtaagtgaagaagagatgtataaaattgcagaaggctttggtcttggcatgggtatgatggatacctgtggagcgctgaccggactgtttatgctgatcgggttaaaaaacagcggcggaacagagcaggcaggaaagacgaaggcaagcacttacaaaaagacgaaagagtacgctgcaaagttccaggagattaatggatctgtttattgtaaagaattaaaaggggtagcaacaggaaaaatccttgctccgtgtgataaatgtattttagatgcagtggaacttgcagagcagttcctgaaagaaaattaagatggagaggatgaaagcaaggcaggtgctgtccattacgctgacactgttcgcggtgttttttggtgcaggaaatatgatctttccgccggcaatgggacagcaggccggagaacattatatccaggcgctggcaggatttatcgtgacagatgcggggatcgctctgcttgggatgatcgcagtggtgttggtcggaacagaagtcagtgacctgggagagctggtcggcagaaggtttgcgatctttttatctgtttgcatttatctgctgatcggtcctttgtttgcactgccgcgaacaggaagcgtttcttttgaacttgcagtgcgcccgtatctgacagagccgaatgtatggtgggtatctttgatcgtgacaggaatttttttcggactgacctattatctgagcgggaatccgaaaaaggtggtgaatctgatcggaaaatacctcactccggtgcttttgatctgtattgtcctgatttttctggcatgtgttttaatggaaaaatcaccgcatggccgggttcagtatggcagcatcggtgcccctcggggagcatatgcagaaattccgttctttcagggaatgattgaaggatattatgctctggacggtccggcaggactggtgtttgcgattattatcatcaatgcggtccgcggatttcaggtacatgaaaagaagaatatcatcaaatacacgttgttctgcggagccggggcggcgctgattctttcggttgtgtattatatgctgacgtatatcggtgcagtgacgcagacgccattttccaacggcggcacactgcttcatgcagtggcaagtgacctgctgggtcctgtgggaggaattgtactgggagttgcggtgttttttgcgtgtatgacgacatccattggactgacaacatcttttgcagattatttccacgaactgtttccgaatatgtcatacaagaagatcacagcaattgtctgtctgttcagttttgtgatcagcaacatcggtttggatatgctggtacaggtatcgcttccggttctgatgatgatctatccggtgaccgttgtgcttgtgattctttcgtttttcaagaagtggattggaaatcgaaagatggtatatgtactgggaatgctgtttgcgttctgtgttgcttttgtagacgggatgcaaagtgtgaaaattatgctgggtcctgttacagaattctgccggcagctgccgttttatgatcttcggcttggctggatcataccggcagtggcgggagctttgttgggactgctgccaatatggaaatataacagagaatgagagattctataatttaacagaatagagtagagtgaaagaaggagcaggtaccggtcattccgatatatatggaatgaccggtacctgctccttttttgtctttatagcattgcacaaaaagaggacttgaaacagtttttttcttgaatttaaaacctttttgttataaactgcgttatatttatgtagaacgttttacaaattgagaatctgaaaggagaacgggtgcaaaaatgcttgataaaaactcaatagaagacaaaaaagtaatccgtaggattcagtccggagaggcagaggacagtcagattctgattgaaaaatattatcaggaaattttccggttttcttattacatgacaggaaataaagaagacgcatatgactgcacacaggaaacttttctgaaaatgatacgatatatcggacaatataaagaaatgcagaaatttaaagcatggttgtttcagattgcaaggaatgtctgttatgacggttttcgtagagaaaaggagattccttcgggaatttccaaagagtttgtacagggagaatctctggaaacaccggagaaatatatgcaggcaaagcagatgtcggaaagagtaagagatgccctgtctcagcttccggatatgcagagagatgttttgattcttcggttttatcatgaactaaagatcaaagagatcgcgcagatcacaaacacaggaaatgcaaccgtaaaatctaggctgcggcaagggatggaaaaaatgaagagggctttgggagaggaggtatggtagatgacacgaaaagaaaagaagctttatgagcagatgcggcaatatcagccaccggatgtggaggcggagaaatactttgaaatgcaaaaaaaagcacaggaagaaatcgcaaaggaaaaaattttaccacgactgcatttgtttgagagaatctggatccaggcagaatatctgtcaatctggttttggatcacggaaggaatccttcttgtggcaggaatcgtattaactcagacggcagataaggaatcgtatattacatttgggtatgtactttctccactccttgcgatgatcggatttccggctatattgaaaagtttttcgaatggagttggagaactggaacagtcctgccgctataatttgagggaaatttttggaatgcgtattttactgacaggagtaacagaggcagtggtacttgttattgttttggaaattggagagttaaaagagggaagcatgatggaaagtgttttgaaagtgtttgttccgtttttgttttctacagcgatctatttttggatcatccgtcatgtttcaacaaaggctgtgtacagtattctggcaggtgcagcggtaatgctgtgtatcgggtgcatgcagctgaaaacattctgtgagatgcatccggagcttttatggattcagaaggaaaacgtattatttttggcttttttgggagcattgtttctgactgtgataggagcaagacagtatctgcagttcattggaaaaaagaaaaaaggatgggatgaattatggaacttcaattagacagagtgacaaaacaatatggaacgaagcgggcagtagatcgtctgaatctttctatgaaagtaggagtatatggcctgcttggcgctaacggagcaggaaagacgacattgatgcgcctgttatgtgatattttgaatccgacatccggggaaatccggtacgatggacagaacattcacgttatgggagaagaatatcgaagccttttgggatatctgccgcagaatttcggatattatcccgagtttacagcggaaaaatttatgctttatatggcagcgctgaaaggtctgaaccgttcgtttgcccaaaatagaaccgaagaattattgagactggtgggattggagaaagaacgccggaaaaagattaaaacattttccggcggaatgaagcgaaggctcgggattgcacaggcgatgctgaatgaaccggaaattctgatcctggatgaaccgacggcaggtctggatcccaaagaaagagtgcggtttcgaaatctgatcagttcattttccaaggataagattgtacttctttcgacgcacattgtttcggatgtggagtatattgcagacaagatttttttgatgaaagaaggacagatcctgaaagaaggaactccagaggaaatcacagcacagatgaacggacttgtatgggaatgtgaagtggatgaaaagagagcggcagaattagaataccggtatacgattgtaaatatgaagaaaaaaaacggagcgatcgaattgcggattgtgtcggatacaaagcctgatgaagcggcaatatccgtggatgcgacgctggaagatatgtatctgtattattttaaggaggatggaaatgaggcaattatggagttttgagtttcagaagattgtgggacgtaaactgatacgggtcgctctgctggcatatggagttttgatactgattcttcttagtaattccagagtggattttctggatatttttgatcagaatggcaggcatctgcatggaaaagaagctttggaatacgagttgaagatggcggagcgataccgtggtccggtaacagaagaaaaggtagatgcgttgcttgtacaggaaaagcagggagcgaaaaatgccggaatgaatgaagcggaataccggcttcggacagattggatcacaggaactgcaggtacaatctgggaggaagcgcttctgtcaaatcctgaacttcaaaattcgttacaaatcggatataccagagggtgggaaacaacactcctttcgatagaatccttgttccttatcatgggatttttgatcattgtggcagtttctccggtgttttccgaggaatacgggtgtggaatggatgccttgcttttgaccggaaagtacgggaaaacaaaatgtattacagcgaaaatcatggcttcttttacattctctgttgtgctgacgattctgacagttttcattcctgtgctttttatgctctggcagtatggaacagaaggatttgaagcctcacttcagtttggaagcagaggattgttttgggaagttccatgggaggtgagttgttttcatggatttttactggtggtagtatttggtattgcaggagcagttctgttgagcagttttgtactgcttgtctccgcagcagtttcgtcctcgtttgtcagtgttttgatttctattttaatctatgtgctgccgattgttttgatctttcgttttggcttactttcgtttgatcagtttttagcaatcatgccgagcggagattttaatgtggcaatgttgttggcgatgcagggtatttctgtgactggaaatgaaattccgatgtggagcatcaaccttcttctgacagcggcaggggttcttgcagttttgctgggaggaagaaaaatttttggaggacatcaggtaaagtcgtcctgaaaaattagtaaaaaagcaatgaggagcccgaagtgactccttattttcatgtggaggtttctagggtgacatggtatagtaaaagggacaaaaaatgacaggagtacaacatgataaaagaaatcagagaagagttagatcaacttggggaagagagctataagcagtttaatcagaagctgatcccagggaccgatcatgtgatcggtgttcgtatgccggctcttcgaaagctggcaaaaggaattgcaaaaacagattcgaaacagtatctggaagaagcacagacagaaatagatgaacggtctgcgcatgaagaaattatgttatacggacttgttctggggtatgcaaagatgagtaccgaacagagaatgcaggcgcttgatatgtttgttccgaagattcataactgggcagtctgcgacagctgttgtatgggatataagttcatggaaaaagagcaggaagtgtggttttcttatctccggaagtatcggaacagcagcagggagtttgaagtccgtttttttatcgtatccctgctggcgcattacattaacgaagcctatattgagcaggtgcttgagattctgaatcataccagtcatgaggggtattatgtgaaaatggcagtggcatgggctgtatcagtctgttatgtcaaatttccgattcagacaaagagactgctgctggcaaatgagatggatgattttacacataataaagcgatccagaaaatccgggaatcctatcgggtgagcagagaagaaaaagtggaattgaatcggttaaaacgatagaagcgacaggaggaatgtgtgatgcgtcagatgcgtttagaaaaaagagagattaaggatccggcagagctggaaaaagtgttggatgcatgtaaagtggtgcgtataggaacaatggatgcggaggggatgtttattgttcctgtaaatttcggatatgaattttgtcagaaagagcgcggcttaaaattgtatatccacagtgcaaaggaaggacggaaagcggaagcatttgcagaaaacccgaacgtagcaattgaaatggactgtggccatgaggtgatccgtggagattatacatgcagttattcttttgcattttccagtatcatgggaaacggacgaattcgtatggtggagaacgaggaggaaaagagacacggacttacgcttttaatgcagcacgtagaagcgggcgccgaaattgaatttcttccgcatatgctgcagcgggttgcagtgtattgcattgaggtttcggaatttacaggaaaacacggagagaaaaaaggacagacagcatgaaaattacattgattacagtaggaaaaatcaaagagaaatatttaaaggatgccatcgcagaatattccaagcgtctgagcaaatattgtaagctggatataattgaagtatcggatgagaagaccccggatcaggcaagtgagactgtggaagaaggaattcgtagcaaagagggagaaaaaatcttaaggtatatcaaggatgatatgtatgtgatcacactggaaatcgcagggaagatgctgacatcagaagaactggcagaaagaatagaaaaactgggaattcagggaaagagcagcattgcatttgtgatcggtggctccatcggcctcgggaaagaggtgttgaaacgctcagattacgcacttagtttttcaaagatgacatttccgcatcagctgatgcgagtgatactgttggagcaggtgtatcgaagttatcggattatgaatggtgagccatatcataaataagaggagatatatgatttatataaacagatataatgtggaagaagaatgggagcactatctccaagattatcgggagtgtttaaagactgtatgttccttggaagaattgtcacagatattaccggaaatcgaaagtatagagtataaaaagcagattttgtgtctgcaaaatcgaaaacagaatccgtttgttatatgtaagattatgaaacagaaaatacagatcggattttgtgactatatttgttatgcagatgaagatggaaagtgtttgattggaaatttctttgtctatgcagagcatcgaaataagggatatggaagtgcagcatatgagcagattgaaagagagttaaaacaacaaaatggaaaatacatagacattacaccggcaaaagatgcaatcttattttatctgagaaaaggatttcagaagaccacacagaagtccttagaaaatggggaaattgtgtatagaaaacaaatataatagatcagaacaaaagaaaagagagggaaacaagatgaaagaaaatcaagtgaagaaattagtgatggcggcaatgtgtgtggccttggggatcgttcttccgatggcattccatacgattcagaatgcgggaagtatttttttgcctatgcacattccggtattgatctgcggtctgctctgtggatggcagtatgggctgatatgtgggattttagcgcctgtattatccagtctgtttacaggaatgcctccggctgcaatccttccggcaatgctttgtgaactggcagtctatggattgattacggggatctgtgtgtacggcattcatacagaaaagcaaattgtaaaaatatatggttcgctgatcacagcgatgctggcagggagaattgtcagcggtattttaaaagcacttattttcaatgtgggagaatatagcttcaagatctttattacatccagttttctgacaggaataccaggaattctgattcagttgatttttattccggtcattgtgctggcattacagaaagcagggattgcagagccgaaaaggagatagttaccatggatatcagaacatattttaatcaaagagccgcacattgggatgacggggagcaatcggtcgatcagatcagacgtatgatcgcatttttaagtgatattcaggagggaatgagtgttttggatgttgcctgtggtacaggggcgatgtttgaggcgctgcgggaacgaaaaccttctcatatcacagcagtcgatctgtcagaaaagatgatcgagatcgctgcccgcaaagtagagggggactccttgtttgaattgcagtgccgggatctgttcgagatgacgcaggagacatttgacaggattatcatctataatgcataccctcattttatggagaaagacaaggtagtacagaaggtggcagagctgttaaatccaggcgggagatttatcgtggcacatggagcatgcagggagaaaataaatggttgtcacacgaatgtgccaaaagagattacgtccggtctgttgtctgcaaaagaagagagccgtctatgggagacttgttttagcatcgatattttgatcgatacagagcagttttatttgttttcgggggtgaaataaaattttactggaagatctcttgaccttcgcccaaagtgaagatttagaatgagtgtagaatcaaaaaggagagatcacagtatgaaaacagaatatacaatcagtcaaattgcagaaaaactgcatattacaacaaacaagatcagattttatgaaaagaaaggacttctgactccgatgagagagtcgcagaataggtatcggaaatttggcgaagaggatattttccgtttggagacgattctgctttatcgctcgttgggattgagtattgaagccattcagaatatattacaatgcaataagaaagaaaattatctgacacatatgcaaaaccaatggatggcagtcaataatgagatccacagattgagtgaaattagaaaatctctggaaacggttctagacaaagtatatgaagagtctgaagaacaggaattagaaaaagattttttgaagatcattgaacagagcaatctgctttgtcaggtgaaaaatgagtggaaagaccagtgggattttgatggctgggcaagggcatatgatgaggatgtgaaaagggacacaggtgcattaaaaatctatgagaattatgagacagtattacaaatggtttttgaggaagtggaaaattttcagagaaaagatggaaagatacttgaaattggtgtcggaacaggaaacttggagggtaaatttttacaaaataaatatcatatcattggaattgatcaatccaggcagatgctggcagttgcaaaagaaaaatatccgaagctgcatgtacggttaggagagtttttgaaaataccatatgaaaatcagacatttgacgtgattgtctctacttatgcatttcaccatttgaatgaagaagaaaaaagagttgcaatagcagagatgatgcgggtgttaaagaaagatggaaggatcattttgggggatttgatgtttcagaataaggctgaagaacagaaaattcgaagcactttgtcgcctgaacagataaaggagctaaacggagagtattattcttatttgcatcttttgataaaagaagtggaacagtatgaaaaaagggtagtatataaaagaattgacagattcaattatgttgttgcgatacaataaaaaatcttgaatgtcagggaggaaatgcaatgaaaactttttattataacggaacaatcatcacgatgagagagcctgccttgtatgcggaagcagtctgcgtggaaaatggacgtattcaggcagtaggtactctggatgatgtgatgcagtataaaacagatggagacgagatggtggatttgcagggaaaaacgatgcttccgggatttttggatgcacattctcattttgtaggagctgccaatgcaatgacacaatgcgacttgtcagagtgtggaaatttttcggagattgtagatgccatgaaaatgtttgccgaaaaaagaaatttatccaaagatgcatggatcgtaggctgtaattatgaccagaattttctggaggaaaaacgacatccggacagatatgtattggatgagatcagccatacaaatccggtattgctgatccatgcttcctctcatatgggagtggtaaacagcaaaggattagaaattcagcagattgatgaaaagacagaagattgtccgggaggaaaatatgggagaatcgcagggacaagaatcccggacgggtatatggaagaaaaagcgtttcttgcgtttcagtcaaaactgccgatgacatctatggaggagctgatgcagcttatcggggaagcgcagaaaatgtatgcgagttatggcgtgactacggttcaggatggaatggtaggaaaaccgttgtttgagctgttaaaatatgcctctgccaatggactgttgaagctggatgtagtagggtatgcggatattatgacggcggcagatctttttgaggaagaaagggcatacgcaaactggtataccggtcatttaaaaatgggaggatataaaatttttctggatggctcaccgcagggaaggactgcgtggatgacaaagccctatgaaggggaagagaattattgcggctatccgatccatacagatgaggaattgaatcactatattgagcttgccttagagaaaaaacagcagcttttggcacactgtaatggagatgcggcagcagagcagtatatcggacagtttgaaaaagcactgtcaaagagaacggataaagatctgcatcgggcagtcatggtacatgcacagcttgtgagaaaagaccagctgcagagaatggcggcaatcgggatgatcccaagcttttttgtggctcatacgtattactggggagatatccatcttcaaaatttcggagaaaaaagaggcagccagatttcaccggtgaaagatgctatagattacggaatgaaatatacgttccatcaggatacacctgtgatcccgccggacatgatgcgtacgataagcagcgcagtcaatcgtatttcaagaggtggaagggtcatcggtgaaaatcagaagatttcagtattggatgcattgaaggcagttacgatttatgcggcgtatcagtactttgaagaacatgaaaaaggaagcattgaatgtggaaaatatgcggattttgtagtgttggagaaaaatcctctggaaactccaaaggaagaattggcagagatcaaagtctggatgacaatcaaagaaaatgaagtaatttacagaagtggagaagcgaatcatgaataatcgtaccaaaggaatcagtctggcaatcatcactgcagtaatgtggggaatcatggggatgtttgtaagaggactgaccgggtatgcgtttacaacttttgaaatctcatttttctgctgcgcactggcaggtggcgcctatttcctgtttttgctgtttacaaaaccctcggctctaaagattaatttgaaggggctggtgatttgtcttctttacggagcggtggcatacagtatcagctttgtgagctatagtgtggcagtttccagaattccggtgggtgtggcaactgtgctgatgtttatgagtccgatctgggtggcaatcctgggacggtttatgtttggagaaaaactgctaaaaagcaagatggtgacgattttgatttgtctgatcggcgcagtatttgtagcaaatctcatcggaggcggagatatcaagctggatggaattggaattttagctggagtgatcaatggtgtcggagtagcacttcagattctgctcccgaaatattttgcaaaagactatgagagggatacactgttggtgtatggatttctcggggcagctgttgtattgatgtttggtatggattttggtgcagtatcttcccatatgagcagtacaccaacaggagtgttgctctggaatttatttggaatcggaattctgtgtaccatggtggcgaatgtatcctgcgtcaaatctacacaatatgtggaagcaactacaaccagtatcctttctgcactggaagttgttgtaggaactctggtcgggtttgtggtatttcatgagcatatgactatgcttcagattttaggtgcagtgatcattgttgtgggagccatcggatcggagatttatcagccgaaaagagttgaaaaagattatgggagggtgaaataaaatggaactacagaaagtatcacgcagatacagaatcagactccttcaggaaacggacatggatgatattttacgattaagtgaaagtaatccgatgttttatgaatattgtcctccgtttgtaacacgagagagtattttaaatgatatgaaagctttaccacagggaaagacagacgcagaaaaatattatattggtttttttgaagggcagaagttgattgcgattatggatatggtgtttgcatttccagatgatgaaacagtttatattggattgtttatggtagatcatgatgtacaaggatatgggattggttctattatcatagaagaatatgcagagtatatacgtacgctgggaaagaaaacgatccaactggcatttgccaaaggaaatctccagagtgaggcattctggcagaagaatggatttgtgagaacagggaaagaagtgcaaaatgatgggtatattgcagtctgtatgaagcgggaactgtagaatggagacttacgatggtatatttagagcaatttagatttcctgacgcggaagtggaatttgatttttttctcaggcagaaacgtacctgttatgatacgtattatccatttcaaattctgtcaaagcatcgttttgagcagattgattttgagcctgttacgattttatatggcggaaatggaacgggaaagtccaccgtgttaaatattatcgcgcaaaaactgcatttgttgagggaagcaccatttaaccagtccagcttttatgaagactatctggaactttgctcttttgagagtgcagcgcatttgccgaaagacagcaggattattacaagtgatgatgtatttgattacatgttaaatatccggaatctgaatgaagggattgaccggaagagggagatgttgtttgaagagtatctggatacgaagtttgaaaagttccagatgaaaagtctggatgattatgagcagttgaaacgagtgaataacgcgagaagaaaaacacagtcacagtttatccgttcggaactcatggataatgtacgagagtattccaatggagaaagtgcatttctatatttcacagaaaaggtgacagaaaatgcattgtttttattggacgagccggaaaacagtctttctccggcaaaacagcaagagctggtaaaatttatcgaagattccgcaaggttttttggatgccagtttgtgatcgcaacacattctcctttcgtgctggcaatcagaggagcaaagatttatgatctggatgaggagcctgtggatgtgaaacgatggacagaactggaaaatgtacgggcatattatgatttttttaaaaagcatgcatcagaattttagaaaagggcagcaagtgtacttctgatcagaaaaccagaagatgcacctgctgttttttaaatagggtatttcttgcagagggattccagaatttcaatatgaagttcttcatccagaataatgcgtttcaggcatttttggatgtcttcatcctgaattcgctgacattgttcccgatatttgcggactgcctgcttttcaccatttaacgcactgagcagaatttttggaagatccgtaaaataattgatatatccggctgtccagtagaacatgcgattttgccgatgtgtccacaggcgtggggattcacccagctgatcggcaagttgaccgaatattttgagatggtgcatttctacaatactgatgttcttaaagatttctgctatgcgggcagtatcggaagtcagaaaaatactgttgtaaatataaagaccaatcgtggacatttcggactcctgtccacccatgttatccagcatcattcttccatataaaggattttgttctttgatgcagacgggtggatagggagattgatgggcatataaaaaatcgggagaagtgtctgtgggtgtggaatcgggggtgcagctacagctgcaggttaaatcgttattcatagagaactccttgtgataagtttacagtgttatcatatgaaaacatagagtaaaatatgtgattgttttttaggggaatttcaatggttcagattgtactttttttaaatattcgtctttgatatgataaacatagctttcttgataaatcataatttcaccaccatttagataaaaatagccctaccttgcgatagggctggattttcgagccggacatttattagacgcttccggtaagcgaacaatattttcgatgatagatttctctatccctgttattattatacgcagagatagaaaatatgtccagaaattgcctgaagattgaaagccggaagcgtatgtggtattttttatcagcgctgatgttccagatttttatttgcagtagaaagcatcagcttgatccgattgagctggttgacttcgctggctcccggatcaaagtcgattgctacgacattggaagtcggatatcttcttctgagctctttgatgacaccttttcctaccacgtggttcggcaggcaggcaaatggctgtgtgcagacaatatttgcagcgcctccgtggatcagctccagcatctctccggttaaaaaccatccttcaccggtctggtttccgatggaaacaatctcagatgccatttctgcgagtttttcgatcttggcaggtccttcaaaatgcgtgctttcttcaaatgctttgcttgcaggtgcacggaaccattcaagcgcacgaataccaagatttccgagtacagccttggattttttcatgccaaggtgggacaccttgaaattctggttatagaagcagtagagtaaaaagtccagaagatccggaacgactgcttcggcgccttctttttctaaaagctcgaccaggtggttgttggctgccggcaggaactttacaaggatttctccaacgattccgactcttggttttttcacatccagtgtttcaatctggtcgaattcctgaatcatctgacggcacagttttttaaatgtatggcggtgaggatatccgttggatacaaaatctttacatctctttttccatttttcatgaagtgcatcggttgttcccggcactttttcatatgggcgcatccggtaaacacatttcataaagatatcgccaaatacgacgccatacaaaccacgcagcgccagaagcggcgtgatcttaaatccaggattgctttccagtccgcttagattcagtgaaatcacagggatatgagaatatcctgcttttttcagtgcacgccggataaacccgatatagttggaagcacggcatcctcctccggtctgtgtgataatgacagccagatgatcggtgtcatattttccggataaaatcgcatccataatctgaccgactacgatcagggaaggatagcaggcatcattgtttacatattttaatcccatgttgacagcctgtttgttgtcatttggcagaatttcaaccttatatccggatgcacgaaatgccggttccagaatctcaaaatgcatcggtgacatctgtgggcagaggattgtgtattccttgcgcatctcttttgtaaatggaatcttctcaatagaagatggctggatgatgcgctcggtcttttgctgttctctcacccggatggcagcaagcagggagcggacacggatacgggcagctcccagattgttgacctcatcgattttcagcgaggtatagatcttaccggaacgggtcaggatatctgccacctgatccgttgtgacggcatccagtccgcatccgaaagaattcagctggatcagatccaggttttcttttgtcttgacatagtttgcagcggcatacagtctggagtgatacatccactgatccatgacattgagaggtcgttctacttcgtgcagatgagagatagaatcttctgtcaggacggcaatattataggagttgatcagctccggcagtccgtgattgacctcagggtccgtgtgataaggacgtccggcaagaacaattccgcgattgccggtttcatccagaaacttgatcgtctcttcacctttacgacgcatatcttctctgcatgcagcaagttccagccatgctttgtgaacagcagtgcggatctcatctgcggaaacagaaaatttttcaccaagctcttcaatcagtctggaagaaagcgtctcttcactctggaaagacataaacggatgcataaaatcaatttctccggttacgatcggatccatgttatttttgatattttccggataggaagttacgatcggacagttgtagtggttgttggctttttcaaattcatttcgttcgtaagggatacaaggataaaaaatatgtttgatcccttcgttgataagccactgtacatgtccgtgtgccagctttgccggataacattcggattcactcggaatggattcgattcccagctcgtaaatctttcgggtagaagacggagagagtacgacacggaatccaagcgttgtaaagaatgtatgccagaacggataattctcatacatgttcaaaactcttggaaggccgatcgttcctctggaagcctcttcttctgaaagcgaggtgtatccgaaataccgctgcatcttatattcaaacaggtttggcaggtgatttttggatttttccttgccaagtcctcgttcacagcggtttccggtgataaactttcttccgccgctgaaatgattgattgtcagacggcagttgttcgtacaaccgcggcattttgtcatggtagtcttgtattccaatgcttcaatctcttcaatcgggagcatggtagtgccttcataatcctgataacgttcccttgcaatcagggcagctccaaaagcccccatgataccggcgatatcaggacggattgcctcacagtctgcgattttttcaaaactgcgcagaacggcattattatagaaggttcctccctgtacgacgatatgttttccaagttcagaggcgtcggataccttgatgaccttaaacaatgcgtttttgatcacggaataggcaagtcctgcggagatgtctgcaacagaagcgccttctttctgcgcctgttttactttggagttcataaatacagtacagcgtgttcccagatcgatcggatttttggcatagagggcttcctgtgcaaaatcttcgactgtataattcagcgattttgcaaaggtctcaataaaagaaccacatccggaagagcatgcttcgtttaactgaacactgtctaccgtctgattcttgattttgatacatttcatatcctgtccgccgatgtcgagaatacagtctacatccggttcgaaaaatgcggccgcataataatgggaaaccgtctctacttctccttcatccagaagcagtgcagccttgatcagtgcttcgccgtatccggtggagcaggagtgaacgatctcgacaccttccggaagctgactgtagatctccttgattgcccggatcgttgttcccagaggatctccgtcattgttatgatagaaggaatacaacagcgttccatcttcacctaccaatgctgcctttgttgtagtggaacctgcatcgattccaagaaaagcctttccctggtaagaagcaaggtctttgaccggaacctgatgttttgcatggcggaaagtgaattcctcgtaatctgcagaagatgcaaacaggggttccagacgctccacttcaaattccagttcgattttatttgccagacggctctgaagtgtctgcagaggaatatccacattccgtttggaattcagcgcggaaccgattgctgcaaacaaatgagaatgattaggagcgataatatgctcatcgtccagttttaaagtacggataaaggcctcttttaattccgataaaaagtgaagtggtccgcctaagaaggctacatgtccgcggattggctttccgcaggccagtccgctgatcgtctgattgactactgcctgaaaaatagaagcagctaaattctctttggaagctccttcattgatcagaggctgaatatcagatttcgcaaaaacaccgcagcgtgctgcgatggaatataaagaagtataattttttgcatattcattcagcccactggcgtctgtctgaagaagggaagccatctgatcgatgaaggaaccggtacctcctgcgcagacaccgttcatacgctgttctacatttccatcttcaaaataaatgatctttgcatcctcaccgccgagttcaattgccacatcagtctgaggtgcataatcctgcaaagcggtggaaaccgcaatcacttcctgtacaaacggaacatgcaggtgggtggcaagagtcagccctccggatccggtgataacaggagaaacatggatcggtcccagtttatagatggcacgtccgagaagatcagacagtgtttcctgtatatttgcaaaatggcgttcgtaatcggagaacagaacttcattatctgctcccaggactgcgatttttaccgtggtggaaccaatatcgatccctaaagtatataattcgttctttttcatagtaattcctcatcttttactatagtagttattacttatttaaatgcagtcgttattttacaacattttatattatacgacaagtagtctaaaaacacaattatgagtgttcaccataaatatacaaaagattttaaggaaaaaatagaaaatctcataaaatttaacacaatcctaacgcaaaaaataaaacaattatttgacaaacagtaatgctcactgtacaattactctctgtaagggaataaatatataaggagagattgtcattgaactggttaaacaagctggaaagaaaatttggacgatacgccgttcacaatctgacgacgtacctgatcgggacatacattatcggatatgcaatccgtctgtttatacccgatatgatgatttggctgtatctgcagccgggagcgattctgcacggacagatctggaggatcgtatcctggattctggtaccgccgcagggcagtcttctggaaatcgtcattatgctgatgctttactattctctcggtactacgctggagaggacctggggagcattccgctataatgtatatatcttttcgggtattttatttacggtactgggagcgtttgtgctgtacatcctgtatggctcgggggcagatttcctgggtggatatttcagtacgtattatatcaacctctcaatttttcttgcatttgctgcaagctatccggatatggaacttttgttgtatttcatccttccgatcaagatcaagtggatgggactggtgtatggagtatacatcctgtaccagttggcaaccggcaatcccgcatcgcgcatagtgatcatttcatcacttttaaattttgtcgtgttctttttatccagcaggaatttaaaaccgtatacaccaaaagaacaggtgcgcaaagcaaaattcagacaacagacaagaccgcatatgacttatgcaaatggtgcaaaacaccgttgtgctgtctgtgggagaacagagttggatgattcaagtctggaatttcgattctgttccaagtgtaatggaaattacgagtattgtcaggatcatttatttacacaccagcatgtgaaataagaattaaggataagttagaaggagagttatgacatgaaaaaaacaaaagtagtctgcacaatgggtcctaatacaaatgacaaagaagttatgagaaagttgattcaaaacggaatggatgttgcgcgtttcaacttttcacacggtgatcacgaagagcagaaattccgtatggatcttctgaaagagcttcgcgaggaagaacatgcgcacacagcgattcttctggacacaaagggaccggaaatccgtacaggtcttttgaaagacggaaagaaagtaaccctccaggaagggaatacatttgtacttacaatggaagatatcgtaggagatgatacaaaagtgtctctttcttataaaggtcttgcagaagatgtacagcagggaacagtaattttgatcgatgacggtctgatcggactgaaagtaaaagaaatcgtagatcaggatattgtttgtgagatcgtaaacggcggtgagcttggtgagagaaaaggggtcaatgtaccgaacgttccggtaagacttcctgcaatcacagaaaaagataaagaagacatcaaatttggtgtagaacaggatattgattttatcgctgcatcctttgtgcgcaatgcagagtgcgtccttgagatccgcgcatttttgaaagaactggatgcaccttatattccgatcattgcgaagattgagaatgcagaaggaattcgcaatattgatgagattatccgtgctgcagatggtatcatggtagcaagaggagatatgggtgttgagattccggcagaggaagtgccatacctgcagaagatgctgattcagaagtgtaataataacttcaagactgttattacagcaactcagatgctggattccatgatccgtaatccacgtccgacaagagcggaagtgacagacgttgcaaatgctgtttatgacggaacagatgcagtgatgctgtccggagagactgcacagggaaaatacccggtagaagcattgcagatgatggtacacattatcgaaaatacagagcagcacctggactatgatatgatcctggataaggcaggagatcacttaaagagaggaatctccagtgcaatcggatattcttctgttttggcagctgcgaatctgaaagcaaaagcaatcattacaccgacagtttccggagcgacagcaagagtgatgtcaaacttaaaaccaatccagccgatcatcggagtgactccgagtgaaagagcactgagaagaatgtccatttactggggcgtacaggctcttaaatcaatggaatgtcatacaacagatgatatctgcagtgaggcaattgagatttcaaaagtaaaacgatgtgtagagacaggagatgttgttgtattgacagccggaatccctgcgctggatgtaaatgctgcctgtgagggaatcagtaatatgatgagaatcgcgacaattgaataaaattggcaggataacacatgccgttcatagaatttttctgtgaacggcatttttgtattgacaagcattctcgattcttatatagtgtttcttgaaagaactactaacatgatcgggagaaaactatggaacagaatcagtatgtggaatacctgcttcatttcggactgacaaggcaggaggctctgatttatgtggaattacttgtaaaaggaaagcagacaggatatgagattgcaaaggagacagggatttcccggtccaatgtgtattctgttctggcagcgctggcagaaaaaggagcggcctatgtgatcgaagagtctgcaaagcgctatattccggtaaaagtagaggagttttgcgggaactgtatccgcaggatgcaggaggagcaggagtggatggagagaaaccttccacagaagaaagcggagacagaaggatatatcaccattgaaggagaacagaatattctggataaggcgaagaatctgatcgcacaggcgggggaaagagtgtatctttcctgtacagcaggatatcttgacgcattccgtcaggcgttggaagagcttgtgaaaaagaagcggaaagttgtgatcctgacagatgccccgtatgaattgaaagacgcaattttctatcagacagaggaaaaaggacagcagatcgggttgatcgtggattctaagagcgtgctttcaggggagtatggaaaggggagcctgaatacctgtctgtattccggacagaagaattttgtaactgtatttaaaaatgcaatggcaaatgagataaaattgattcaattacaaaaaggaggaactgtattatgaataaaacaccatttgtaacaaaagaacagctggatgaaattgtgaaaacctatccaacaccgtttcatctttatgatgaaatgggaattcgcgagaatgtaaaggctcttcgggaggcgttttcctggaatgaaggatataaggaatattttgcggtaaaagcgtgtccgaatccatttctgattgacattttaagagagtatgactgtggatgtgactgttcttcctacacggagctgatgttgtcagatgccatcggagtaaagggacaggatattatgttttcttcgaatgatacccctgccgaggattatgttctggcagaaaaattaggggcgatcatcaatctggatgatttcacacacattgattttctggagaaaacgatcggatatattccggagacgatcagttgccgctacaatccgggcggattatttaagatcagcaatgatattatggacaatccgggagatgccaagtacggaatgacaacagagcagttgtttgaggcgtttaaagtcctcaaaagcaaaggagcaaaagaatttggaatccatgcatttctggcaagtaacacagtgacaaatgactattacccaatgctggcaaaagtattgtttgagcaggctgtaaagcttcagaaggagacaggagttcacattaaatttatcaatctctcgggaggaatcggaattccgtatacaccggatcaggagccgaacgatatccgtgtcatcggagaaggggttcgccgtgtctatgaagaggttcttgttccggcaggaatgggagatgtggcaatctataccgagcttggacgttttatgatggggccatacggatgtctggtcacaacagcaatccatgaaaagcatactcacaaagaatatattggcgtagatgcctgtgcggttgatctgatgcgcccggcaatgtacggggcataccaccacatcacagtgatgggaaaagaagatgcaccacatgaccataaatatgatgttacaggatctctttgtgaaaacaatgataaatttgcaatcgacagaatgcttccgaaaattgaaaaaggagattaccttgtcatccatgataccggtgcacatgggtttgctatgggatacagctataatggaaagttaaaacacgcagaacttttattaaaagaagatggaagcgtccagatgatccgccgtgcagaacgtccgtccgattacttcgcaacctttgactgctttgaaattggaaaaaaattgataaaaaattaaaaaagacttgcaaagcaaaataatctgtggtaatatattttttgttcgggagcgaaagatgctcccagacataagcggatgtggcggaatggcagacgcacaagactcaaaatcttgcgtaggtgactacgtatgggttcaagtcccatcatccgcagttgcagacctctgtcttactgagatacagtaggatagaggttttttcgtatatatcggacatccaattcaaatgaatccatctatatcgaaggttagattttagtaaaatcagtagcagaaataccaaggttgtttcttcagaagaggcattaaaagatgtaacaccagtagaatggtcagaagatatattaaatgggaagagaaaagttactgttaagaagaaacagtaaaatggagattcaaaagaaatatgtgtaaaataggagacattattttagtagaaaagtacaaatcaggtaataaggagataggaaagcattcatttattgggatttaagcgagaattttccaaactgatcggtttcttgctcgttgccttaattgtggtggggttggtattcaatgcggccggtgtgaaagatgtgcttttggaactgttcaataagattgtcggtgcataattgtattgctcacatcaatacaatgtagtataatgagcatagaaagaggaacactatttctatgaaaggagctgttattatggcaaaatcagcgagcgtatatgcaagaattgaccctgaattaaaggaacaggcagaaacgatattatctgcacttggtattcctacttctaatgcgattgatatgtttttcaaacagattgtcttaaaaaaaggacttccttttgaagtacggttaccgtatgaaaaacctgtctgcatgggagcgcttagtgaagaagaattgaacgcagaacttgagaaaggatatgcggatattttggcaggaagaacaaagcccgcaaaacaggcgtttgccgaaatgcgcaaagattttaatttatgaaatttgaagtagaattagcagaaaaagccgacagggatttaaggaatatctttttttatatcgcggttgatttaagtgcacctgaaaacgcagaaagacaaatcaatcgtttatgggacgctattctatctcttgatgaactgccggaacgataccgccgttatgaagatgaaccgtggtacagccgaggtatgcgcgttcttccgatagataacttcgtgattttatatattccttacttggaagaaaaagttgtgcgtattgttactgtcatgtatggcggacgtgatataagtgagcagttaaagaaaattgaataatcatgaaaatgaaatatggtgtaggaattaagcagttagtctttaagattggctgctttttctatgcctaaaatgaagcggttgagcacaagttttatggaaaacagtatgaaagaagttgcattaacaggcacatcatttacgccggaagaagtttatgaagatggttatatacttcgtgttgtctttacagaaaaagaaaataaaaacaaaccattaggaaacggtgagggcagttgtcaatataggcagctgccctttttagattttcatatgcacattgacatgttataataagtgcagcaatagctttgtgtgtgacagaagaattacttttagtatttaaggtatgaaaagagggatatttatgatatatgcgcatgtaatcggcctattgggagaataggcgatacgaacatattctcctttgaaaataaacatattttatggacagaaggagaacaaaatggaaactagaaaagaaattcgagaattgcatcggatggcttgtccgattatatgtcattatgtactgaccagtctgtttgaaatgtttgatcaggcaatcataggacagaattccacccgtggcttcgccctggttggaattgcatctgttgtgttatatggggttacaggagcattgggaatgctgtcttctgcgtttcatattctggctgcagaaaagaaggggaaacaggatgaatctggattttggacagtctttcttgtaagcagagaactggtcatttggatcggctgtggatttttcattctcagtttgatgtttggcagggggctttttcagagtatatataaaatccggggaaatgaacttcgggaattattgagctatttttatccggcatccattacggtattggaaaatcttcttatttttcagtacagtgtgtatttcagaaatcagaaaaataccaggattgcactggtagtgacaggaatctccacagtagtaaatttatggtttgattttgcacttgtttatggagcggcaggatttccgcatatggggacagcaggagcagcttggggaagtgtcatcggtttgggctgcggcgtgttcatctatcaggtggcatattggaaagaaatcagaaaaaatttcagaccatgtagagttcgaggtgttgtgagaaggaaagtattacaaaagatcgggaaactttattttccgctgttaggacaggatttgtttgaaaatacgatatttgtatttgtcgtgtctgtggcagcagcacgattgggctctgaggagatggcgatttataaattgttggatttgattggtggaatcttggaacttccgatttatgcatatgctgcggctgcgcagacttatgtattacagagcaatggggcaggagacgataagaaggcgagacaatatcagaaggcaggaatacggacagcagctatggttgtcctggcagcgtccggggtgtgcaagattttttcagacagtatatttggctggatcatagcagatcaaaagatcatcgatggagcggcagggattttctggatgcctgcagtaattctgatgatcaaagttttctatcgatttgaaatgctgtatctgcagggaatcggaaaagaacgttttgtattctggaatactgtggctgcttctatacttgcaggtgtgggagtgctctgggcagggatgagtatgggactgccggggatttatctgggaatatttttacagtacgggattctcgccatacgatatatcaggcagaagaaaggaaaaaatgatgtggtatcagaaggactggtttaccgggattgattattataatttgaaagaaaaacagatccatgttgcagagcagaggatcacgaaacctgtggagcagcagtttcacgaacagacggaaatctattatgtaaaaagcggggatgcagatatctggatcaacggcgaagaatttcatgtacaggcggggagttttttctgtctgtacatgcatttgttttatcacatagagaccattcggaaaccgctgcactgtgtcaaggtttccttccatattggattgtttatgtttttgtgttttgagaagcgtcagacacgggaaaatgaaattttgatgtatggagtccagcctattcttttattggaaggccgggaacaaaagcgggtggaacggattctggaagagcttttggaggaagaacgggaacagcggttttcagcgcaaaacatcagcatttatctggcgatgcagctgcacgcgctgtattgccgatatgccatggaaaagcggccaaaggatccggaaaagaagcagccggtctggaatgtgattcagagagttcttttggatacgagcaagacggtttctttggaagaatacgcacgagaagctgaaatgtcacctgtgacgctgaaccgaaacatagaaaaacagtgcggatatacattttttcagctccagaagatgggaaagatctataatgcctgcgcacttttgcattttccggatctgaatcttcagtatatcagcgattatcttggttttacgaacatcgaggatttttacagagtatttaaacgctatcagaaagtgagcgtaagagaatatcagacccgacatatcggaaatggcgtgcagatgcagtcagaggaagagggactgcagattctggagtaccttttgctgcattttcagaagccatttcagatccgggagatggaacaggagttaaaaaagaatgcttatctgctggaaaaaagagcgaaagagcagtttggaaaaagtgtacaggaattattggaagaagtccgtatccagattgcctgcagttatttaagcgctacagaccggacggtgacccagatcagcagtgacgttggatttggcagtatttcctcttttcagagaagttttgcaaaatacatgaatcagacacccagtgaatatcgcagatttcatcgatgtaaataattgataatcatattgggaaatatgcatatctattttctttgtgctgccctataataaaagcaaaaacgaggaggtatcataagatgtttgaacatgtatttgctcctatccggatccgtgatatggagctgaaaaacagaattatcctgccggcaatggggacaagaatggcagatgagaacggagcggtgacagacaagctgatcgcgtatcacgcggcgcgtgcaaaaggtggatgtgcactgaatattgtagaggttgcagcagtacatacgccaagcgctccggcgcattttgtatcgatcagtgaagatcatctgatcgaaggccacaggagactgacagatgcgatccatgagaacgggggaaaagcgggaatccagctctggcagggatcgatcgcggcttccatggatccaaaggcacagatgctggtagtttcggatatgagttttggtccgtatacactgccggctattacaaaggagcagattcgggaagtgatcgcatgttatggaaaggcagcggccagggcggtagaagcaggatatgactgtctggaattccatctggcacacaattatctgccgcattcgttcttaagcgcaggatttaaccacagagaagatgaatacggcggaagttttgagaatcgctgcagattcccgttggaggtcattgatgagctgagaagaaatatgccggaaggaatgccgttgtttatccggatcgacgcacaggatgatatgttgaaagatggactgaccattgaggatgtgatccgattctgcaagattgcaaaagaacatggcgtagacgtgctggacgtatccagaggaaatatcattacggcggcttccatgtacgaagtgcctccgatcgatgtgccaaacggatttaatatcgaaaatgcggccagaatccgcagagcaacaggcatgctgacggttggtgtgggaaggatcaacactgcagcactggcagaagaaatcctggcagaggagaaagtggatctggttgttatgggaagagcacagctggcagatccggagtttgtaaataaggcgcagcagggaagagtggacgagatcgtacactgcgtgggctgcaatcagggatgctacgatggattctgcgatgtggccaaccgtccgcatatcacctgtatgagaaacccgatgatcggtcatgaagcagaatatgaactgaaaaaagcagaagatccaaagaaagtctgggtgatcggcggcggagtggccggaatggaagcagcaaaggtgcttcaggaaagagggcatgaagtgaccttgtttgaggcgtccgatgcgctgggcggagaatttctgctggcaggagaagctcccggaaaagcagagatgaaagcagcagccatggagatgggaaatcagatagaaaaactggtgagcgttcataagaacacaaaagtggatgcacagatgctggaaaatgcggatgtggatgcagttattctggcaattggttcctccccgattgagatccggctggagggcatggacaaactttcgcatgtatccgcaccagaagtgcttcgtcatgaagtgaatccaaaaggaaaagttgcagtcatcggcggtggtctggtcggtctggagacagcagatgcgctggcctgcgctggatgtgaagtgaccgttctggagatgaaagacagcattggaagcgatctgggaagtctgcgtaagatcgcggtgatgatgaagatgcagcagttacaggtcaaactgcttccaaacagtaaagtatgcagatttacagaagaagggattgttctggaagacaatacattgatcccgtgcgactgtgccgtgtttgcagttggatttgctgccaatgattcccatgcgcttgcagaagtatgtgagaagagagacatcccatatcatgtgatcggagatgccagatcagcaagaagagcgctggatgccattgccgaaggatttgaagttgccagaacactgtaggaggatcagagtatgaagaaaatgtatacaccgcttcagattgcggggatggaaatcaaaaacagaacatttatggctccgatgtcactggggtatgaaagccaggacggaacggtgaatgaaaagatggcaggctactggctgagaagagccaaaggcggcgtgggctgtatcattgtggatgccaccagtgtggatcccaatgtgccgtatcttggaaatacactttgtttccgggatgaagagagcatcaaaaagtataaaagttttacagatcagatccatgcgtatgggtgtaagatcattccgcagatcacacatccgggtccggagagtgtcagcgccttttatggaatcccgccagtggccagcagtgtatatccaaacgcaatggcgcagatgacaagagagctggcaaaagaggaactgccgggaatcgtagcgctttatgccaaagccggtaaagcagcaaaagatgccggatttgacgggatcgaactgcattgcgcacatgcatatatgctgctgggatcgtttttgtctccgctgcgcaacaaacggatggatgaatacggcggaagtctgttgaaccgtgcccgtctgttgtttgaagtgctggatgccatcaaagagacctgtggaagggagtttccgatcatcttgagaatgtcaggaagtgagcgggatccgcagggaaataccgtggaagatatgaagcgtctgattccgtatctggaacagcatggagtggattgttttgaaatcagcggcggaacgcagtacgaacgctgcaataagatcattccatgtcacggagaagaagaatttaccaacctgaaagaagcaagagagattaaagcagtggcaaccaaacctgtgatcacagtcggaaagattctggatgcgaaacttgcagaggatgtgctggaggcagaagaagtagatggcgttgtgatcggacgagcgctgctggcagatcctgactttgtagaaaaggcaaaagaaggacgttacgaagaaatcgccccatgcgcggcatgtggtgtcggatgcgtcggagagcagaccaagagacgtccggcttcctgtgtgatcaatcctctggcaggaagagaactggaatttgaagagcagccggcaaaagaggcaaagaagattctggtcgtaggagccgggatcgccggacttgcggcggcaaggatccttgcaaaacggggacatcacgttcttgtggcagaaaaagaacaaaaagccggagggcagttaaatctggcatgccgcgcgccgtttaagcaggaaatttcaaaatggatcgtgtatctgaaggcggaatgtgacagatatggagtggagatccgctatgaaaccctcgcagaccaggcgatgatcaaggagataaatccggacgttgtgatccttgcaacaggcgccaaaccggtgcttcttccggtagacggcaaagaagagatgatcgcggccaacgacattttgagtggaaagatttctattccgggcggaaatgttgccgtgatcggcggcggaatggttggaatcgagacggcagaatatctgctccatcactccagaggcgcggcaaaagtgacactgatcgagatggcagagagcattggtcagggtatggtgccgaacaatctggtgccgactttgaaacggttgcagcaggagcgtgttcaggttgtaacaggagcgaaagtgaaatccttagaacagggtacggtcactgtggagacagcggcaggagaggtgcagcatccgggatttacccatgtagtctgtgccgttggttccaaagcatggaatccgttgtatgaagaaatcaaagatacctatgagacctatgtaatcggggatgccagagaagtcgcgcaggcgttggaagctgtgcgggcagcgtacgaactgggatatcaattgtagtattttatggaaaaataggatgtgcaggatcattgtcgaaacgggcagtgatcctgcgcgttttttattggagaaagaaagtgtctatttagaaaaaaatcgaaatagatattgcaaaaggcggaaaaaaggactatagtatttataaggaatttagaaaatattctaaatagattccgggaaaggatggtgccgatggcatttgcggagactttcaaagctctttcggatccggtacgcagggagattcttgttcttctgaagaaagaaaaactttcagcaggagaaatcgggaaacattttgaaatgacaggagcaacgatctcttatcatttgaaaatcctgaagaaggcagatctgatacgggaaacgaaatacaagaatttcatttattacgagctgaatatttctgtggtggaagagctgatgctctggctgtcagacttgaaaggggattcaacattatgaaagaaaataaatcaaaagttatcattaccagcattgttactgtttttccaatggtgatcggttttctgctctggaatcgactgccggaaaagattgcaacacatttcgggagtgaaggggcagatggatggagtacaaagctgtttgcagtggtgattttcccgctcatattattagtcatccatttgttctgcctgggtgtgaccttaaatgatcccaagaagaaaaatatcggaagagcgatgatgacgctgatcttctggatcgttccggttctgtctgtcgtgtctaatctgtctatttatggatatgcacttggcatggatgtgaatatggaggtgatcgtcagtattttgatgggtggcatatttatcctgttgggaaattatatgtcgaagaatcatcagaattatacggtggggatcaaacttccatggaccttgaacagtgaggagaattggaatcgtacgcatagaatggcaggaaaattatggattctggcaggactggtattttggggaagtgtattttttgaaaacaacacggtaccaattgtgatcatagtcgttgttgtgacgatcccgatgatctattcgtttgtactttataaaaagggaatctgaaaaagaatcagacagaaattttgctttgctatttatcacgataccgtttataataaaacgatacgagataaaggagaaagagaattatggaacagaaaatagtagcagttgtggcaggaagagaaatcaaagaatctgattttgaaaaattcctgcagaatgtaccgagagagcagcaggcgtatctttccaatccacagttcagacagcagtgtctggatcagtttgtagcacttcatatgtttgcagagctcggcggggagatgaagctggaagagacagaagaatatcaggagatggtagaaaatgccaaaagagatatccttgcacagatgacaatgcgggaagtgatgaaagatgcagttgtgacagaagaggatgtcaaaaattattatgaggagcacaagcagcagtttacaaaaggggagactgttcgcgcaaaacatattctgacagattccaaagaaaaatgtgatgcgattttagcagcgatccagagcggagagacatcctttgaagatgctgcaaaagaaaaatctacatgtccgtccggaacaaaaggcggagatcttggagagtttgggaaaggacagatggtaaaagagtttgaagatgctgcgtttacagcagagatcggtgcgattgtgggaccggttcagacacagttcggatatcatctgatcaaagtggaagagaaaaaggatgcggcagttgcagatttcgaggaagtgaagaattcgatcaggaaccagctcttacagcagagacagaataaagtctacagtgataaagtaaaagaactgcgtgagaaatacgtgcaggaataaaaagaaaacaggacgatcaggaaatgagcagtcctgaaataaggaaggttgtgacttaaaacggttgcagccttctttataattagtaatgaagggagaaacacgtgatacgtaaatatcaaccacaggatttagagcacataatgaaaatctggctggagacaaatcttgctgctcatggctttatcccggcagagtattggaacgggcagtatgaagctgtaaaagaggctctgccgcaggccgacattctgatttatgaagaagaggggacagttcttggatttctgggattacaggacagttatatcgcgggactttttgtggaaaaagcatctcagtccagagggattggccgcttgcttctggaagctgctaaatcgggacggcaggagctgacacttcacgcttatgcagagaacacaggagcagtccggttttatgaacgggaggggtttcaaacggcagcatttgaaaaagaagaaatgacgggatgcgagggtgttttgatgcgctggacaagagaagaagagaaaaacagcctttaaaaaacaggatatttggtgtatagtaatctctgtaagtaaaattaggagaatcgacatgagtgaaaaaattgttttgatagatggacacagcattttaaaccgggccttctatggagtgccggatctgaccaatgcggagggtcttcatacgaatgcggtgtatggatttttgaatatcctgtttaaaattctggaagaagaaaaaccggagtatctgatagtcacatttgatgttcatgcaccgacatttcgtcatgagatgtttgctgattataaaggaacaagaaagccgatggcagaagaactccgtcagcaggttccggtcatcaaagaggtgctgaaggcgatggacattgcgatcatcgagaaagccggactggaggcagacgatctgctcggtacgatttccagaacctgtgaggaaaaggggatggaggttgctgttatttcaggagacagagatactctgcagcttgctacggagcatgtaaagatccggattccgaagacaaagggcggacgcacggaaatcgaagattactatgcagcagatgtcaaagagcgttatgaagtgacaccgacagaatttatcgacgtaaaagcgctgatgggggatacagcggataacattccgggagtgccgggagttggtgagaaaactgccaccaagattattgtggaatacggatcactggagaatgcctatgcacatgtggaggagttaaagccgccgagagcaagtaagaatttaaaagaattctgggaacaggcaaaactgagtaaagttctggcgaccattaatacgcatgcagaactggagttctctctggaagatgcaaagcatggaaatatgttcaccaaagaggcatatacgtggttccagaaactgcagtttaaaaatctgctcggaaagtttgatgtggaagcagctgaaaatgaagttgaaaaagcattccgggaagtaacagagcaggaagaaatcgagcgaattttctcagaggcaaaaaaggcagagtgtgtgggagctgcactgatcaaatgtgacgggaatgtgctgccgttattcgcacatccgtcaggatacggcaggattgctctggcatacgggaaagatcaggtgtattccattgcatgcagtatggatacagatatggatgcattgtttgcacagctttcggatgtggcacgttctgccgggcgttttgtcatgtttgatctgaaaaaatatctcccggtattgggcgcggtttgtcagaaaaactgctttgacgcaacagtggcagcctatcttctgaatccgctgaaaaatgattatacctatgaagatgtggcaagagaacagctggggctgatgatcgatgacaaggcagatgagtggacaaagagctgttatgaagcatatactgcttatgcggcatctgaaaatttgatggaaaaactcaaagaggagcagatggacaggctgtttctggaaattgagatgccgcttgtatttaccttatttgatatggaacaggccggggtgcgcattgaggctgaggagctgaaaaaatatggagaacaattgggcgaacagatcgtacagctggaatccgagatttacgagatggcaggggagaattttaacatcaattctccgaaacagctgggtgtgatcttgtttgaaaagctgcagatgcctcatgccaagaaaacaaaaacaggatattcgactgcggcggatgtactggaaaagctggctccggaatttccaatcgtggataagattctggaataccgtcagcttacaaagttaaaatctacgtatgcagacggactggcaaattatatcggaccggatggacggattcacggaacgtttaaccagacgattaccgcgaccgggcggatcagcagtacagaaccgaatctgcagaatattccggtaagaatggaactgggaaggctgatccggaaagtatttgtgcctcaggaaggctatgtatttattgatgcggattattcgcagattgagctgcgtatactggcgcattgttccggagatgcacatctgatccaggcataccgggaggcacaggatattcaccgaatgacagcgtcccaggtgtttaagactccgtttgacgaggtgacagatctgcagagacgaaatgccaaggcagtcaactttggaattgtttacgggatcagttcgtttggattgagtcaggacttgagtatcacgagaaaagaagcgtctcagtatattgaaagttattttgagacgtatccgggaatcaaaaagtttcttgacgattccgtgacgcatgcaaaagaagaaggatatgccgttacattgtttggaagaagacgtccgataccggagttaaaatccagcaattttatgcagaggaatttcggagaacgtgtggcaatgaatgcgccgatccagggaactgcggcagatattatgaagattgccatgatcggagtcaaccgggaactgaaagaaaaacagatgaaatcccgtatgatcctgcaggttcatgatgaacttctgatcgagacacatccggatgagatcgagacagtgaaagagatcctcaaacggcagatggaaacagcggcttccttagatgtgccgttgatcgcggatatgcaggtcggaaaaaactggtacgaggcaaaatagtgatgaaggtaattggaattacaggtggagtgggttccgggaaaagtgcagttttaaagctgctggaggaagaatatcatgcagttgtagtacagcttgatgaagttgcaaaagcgctgcagagaaagggcactccctgctggaaagcgatcgtagaagcatttggaagagagattttagatgaaaacgaagagctggaccgcaaaaaactggcccaaattgtgtttcagagcagtgaaaagctggaacagctcaatgggatcgtccatcctgcggtaaaacagcaggtgcttctggatatcgaagaaaaaagaaaagagaagacagagctgtacgtactggaggctgctcttcttctggaagcaggatatgccaaaatctgtgaagaaacatggtttatctatacagaggaatcggtaagaagagagcggctgaaagcatcccggggatatagtgatgaaagaattacagatatgatacgcagccagagtccggaagcgtattttcggaaaaactgtacccgggtgatcgacaacagcaaagagatcgaagaaacaagacgacaaataggagagatactatgagattatgcagcattgccagtggcagcagtggaaactgcatctatgtaggcagtgacaatacacatttactaatcgataccggaatcagtaaaaaaagaattgatgccggtttaaaggagctggagatcaaaggggaggagttagacgggattctgatcactcatgagcactcagatcacattcagggacttggagtgttcagcagaaaatatgagatcccgatctatgcaactccgggaacgattgcggggattcaggcgtattccagactgggagccatgccggaaggattgtatcatgtgatacacagtgatgaatcctttatgctgggggatatccgggtaaatccgtttgcaatttcccatgatgccaacgaaccgaccggataccgtctggagtgcagagacaaatctgtggcagtagcgacagatctgggaatctatgatgcatacacggtgtcccatctccagaatctggatgcagttcttctggaggcaaatcatgatctgcatatgttggaagtgggaccatatccatatccgctgaagcgaagagtaatgggagataaaggacatttgtcgaatgaattgtcaggacgtctcctttgtgatatactacatgataatttgaaacatattgttctggggcatttgagcaaagaaaataattatgaaagtctggcatatgagactgtcaaactggaagtgacattaggggataatgcatataaaggggaagacttgaatatggcagtggcaaaaagggacagtatttcagagattatcaccgtttaacttgaggaggaaaaaccatgaaaaaatgtatcgtaaccgtagtaggaaaagacactgtgggaattatcgcgaaagtgtgtacataccttgcagaaagtaagatcaatattttagatatttcccagacgatcgtacagggatatttcaatatgatgatggttgtagatatttcagaaatcgaaaaagattttaaagtaatctgtgatgagatggagcaggtgggcgaagagatcggggtaaagatccagtgccagaaagaagaaatttttgaaaagatgcacagattataagaataagcagagacgaggataaagaccatgattaatatgtatgaagtttccgaaactaataagatgatcgagcaggaaaatctggatgttcgtaccatcacactgggaatcagcctgatggactgtattgattcggatttgaatgaattgaaccgaaagatttatgaaaaaatcacagtaactgcaaaagaccttgtgtcaacaggaaaagatattgaaagagaatttggaattccgatcgtaaacaaacgaatttctattacaccgattgctctgatcggcggtgctgcatgcaagtgtccggaagattttgtgaccatagcagagacactggatcgtgcggcaaaagaggttggagttaattttatcggaggatactctgcgttggtttccaagggaatgaccaaaagtgatgagaatctgatccgttccatccctcaggctttggcgagaacggaaagagtgtgcagttcggtcaatgtaggttccaccagaaccggaatcaatatggatgcagtgcggctttgcggagagatggtaaaagcaacggcagaagcgacaaaagagcatgattcctttggctgcgcgaaactggtgatcttctgcaatgcaccggatgacaatccgtttatggcaggcgcattcctcggagtgacagaggctgatgcagtgatcaatgtaggtgtcagcggtccgggagttgtaaagaaagcgttggaaaaggtgcgcggcaaaggatttgaggagctttgcgagacaatcaaaaagactgcatttaaggtgacacgagtaggacagctggtagccggagaggcgtccagacgtctgggaatcccgtttgggatcatcgatctgtcactggcgccgactccggcaatcggagacagtgtggcagagatcctggaagagattggtctggagagagtcggagctccgggaacaacggcggcactggcacttctcaacgatcaggtgaaaaaaggcggtgtgatggcatcctcttatgtaggaggactcagtggtgcgtttattccggtcagtgaagatcagggaatgatcgatgcagtgaatgcaggttcactgacactggaaaaattagaagccatgacttgtgtctgctcagttggtcttgatatgatcgcggttccgggaaagacatctgcagcgacaatttccggaatcattgcagatgagatggcgatcggtatggtcaaccagaagacgactgcagtccgtctcattccggtgatcggaaaagatgtgggagaaactgtcgaattcggcggacttctgggttatgcgccgatcatgccggtgaatgagtttggctgtgaggcatttgtaaatcgggcaggaagaattccggcaccgatccatagttttaaaaactagaaacaggggagaaaagatgaaaaaaattgcaatcgtaacggacagcaacagtgggattacgcaggaaatgggaaaatcgatgggaatttatgtgatccccatgccgttttttattgacggggagctgtttctggaagatattacgctgacgcaggaagagttttacaaacggttgggagacaattcggatatttccacgtctcagccatctccgggtgaagtcatggaatgctgggacgagctgctgaaagagtacgatgagatcgtgcacattccaatgtccagcggactgagcagcacttgtcatgcggcacagtctctgtctcaggaatacgagggaaaggtttgtgtagtggacaaccagagaatttctgtgacacagaagcagtctgtagaagatgcgatcacactcagagaagcgggaaaatctgcagcagagatcaaagaaatcctggaagcggaaaaattgcaggcaagcatttatattacagtggatacattaaagtatttgaaaaaaggcgggcggatcacaccggctgccgcagcgctcggaacggtattgaacctgaaaccggtgcttcagattcagggagaaaaactggatgcattttcaaaagtaagaggatggaaagccgcgaaacgcaccatgctcaaagctattgaaaaggatctggaagaacgcttttctgaggtcagagaagacatggtattgggaatggcgtatacttgcagcaaagaagaggcacaggaatggaaacaggagatcgcggagaagtttccggaatacgaaattgtagaaggtccgctttctctgagcgttgcctgtcacatcggaccaggggctatggcagtgacctgtatgaaaaaagtccggtgattgccgctggtattatgaaaaatgtccgaataacctcattttataggttattcggacattttttaaatcaaatctaaatcattttgtgttagaattgctttaatctataaattctcaggtggtgcttacatgaaagaacgtatattgattatggaagatgaaacagcaatacaggctgttttatatgagttgttgactgacacgggatatggggcatattgacgaactgaacaaacagcgtcagcatttttttgcgacagcttcccatgaattgaaaaccccgattaccataatcaaggggcaggtggaaagtatgattatggaaatcgggagatataaggacacaagaaggatacttccggaaacattaaaagaaattgaaaatatggaacagcttgtaaaggaaattctgtcggtatcaaagctggaaatgaatacaacgaatcatacggagcttctttctctttccaatattctgaaacgtgtatataaacatcttatcccactggccaatgaaaaacatatccgtattcagaagaatatttcagaagatgttatgatgatgggaaatgagctgcttttggaaaaagcagtccataatatcatcagcaacgcaatacggcactcccctgttggtgccgaactggggttagaactgtcttttgattctcttcttgtcagaaacagtggtgtaaatattccggatgaagatttggataaactgtttactccattctattgtgtggaaaaatcacataataaattgaccggcggaagcgggttgggactatatcttgtaaaaattatcttggaacagcatggtctgtcatatacgattgagaaccggcaagacagtgtctgcttcaaaatcacattaaattcacataatctaaattaaaattaaatggaatctaaatcagagtgaaaccgtcctttcttatactgcagatataaagaaaggacggtgtttttatgaatgtaggaaagcgggcatttctctatctgactcgcaaaaaaggaaaaaatttattgcttggaatagtatttctattgatttcattctccttgctgacaggaagtgcggtctatttgggaatccggcaggtttctgaggatttgcgttccgatattggagcttctttcaatatcagaccttatgaacagttcgatgtgaataacggacaggtttccagtaaggggacacctgttatggatgagcagtccattcggcgggttatttctatcgttggaaaagaactgaaatgctacaatacagaacactccggctatgtaaagggagaaaacctgtcatttctcgcagggacaggacacagtgaagaaagcaatatgggaactgtaaaagcggtgcgtgattccagcttgtgtcaagcctttttggatgaggaatacgaactggcagaggggaaacatatcaaatcagaggacaacgggaaaattcttatcagtaaagcccttgccgaacaaaacaatcttgctgttggaaataagataactcttacccatgcaaaactgggttcagacaatggtgtatatacagacctgatgaaagaaaaaagtgcatatgaaacagtggagatcaaaggaatctacgatataaaaaatgcttccgataatgctttaaatccgacagcgaaaaaagccgaaaatcttattttttcagatagtcaactgctagtcaatttgcaggagcaggaacaaggtgtttatgagggcgagatttcttttttcattgccgacccactgcatcttgacaagatggtatcagaaataaaagggattgattcgattgcctggaacaaccatgtcatcaatacgaatgacttcaagtattctaagattgcagaacagcttcaaagtatgcaaaaaatcgttgtcgcactgcttgcggttgctgcagtattgggatttctggtatttatgctgatactgacattcaggattcgtggaagaatgcaggaagccggcattttacttgctgtaggaaaaccgaaacagcagattatcgggcaatttctgatagaggcaatgattctgctgtggatcggctttctagtggcaatcattatctttcttccgcttgcagatacattaaattcattgctgtttgatttcataacacaatcaacgattcataagaactacttgcagccagatttcctgcattttgtcatattgctcattttagaaaatctgggtgttcttttgacagtgcttgtgtgcagtggagtgatcctgtcattaaaaccgaaagagattttaaccaaaatgagttaggaggatttatatgaacttttttaagcgagctttaaaatactgtgttagacagaaattacgtacgctgattctgtttttgacatttactctgctgtctgcaactgttttgattgcagtttccagcgagaaagctgttttgcaaggaacaaagcagataaaggaaactgtaggtgcttcccttcgtatggaaattgacatgaacaatcagaataattttggcccggctgaggatttcggaaatggggcttctggatatacctataatggcgaccgtattacagaaaaaataataagtgtaatttcaaaacttcccaatgttgtgagctataacgctaaaatggatggtggctattgggggattccggaaaatttcgagccgattccgggcatggtgaatgcaccaggtttgtcaatcccttatactgcagtattggattcttctttagatataaaatttttaaatggaacatataaactggaagaaggacgacatattaatcctgatgactcttgcacagttttgatttcaaaagaattggcagacaaaaacaatctttctgtaggagataaaattacttttcaagagtttgaaacaggaaaaacggaaagtacctttaccattgtaggaatttatagtggtacagagggtacgacaaaacaagcgatcacacctggtgggattcctgcaaacagaggttatattgatatggatggtctgaaaaagttttatgacggagtaaatgaaaaattggagggatatgacaatcttgatatttatacgcactctccagaggaaaccaaagagcttatggaaaccatcaaaaatcttccagacgtgaaaggaaaaacctttacctttaacattaacacagaagattttgacatagtatctactccattatcttcttttggaagtatagttgatacagccgtattgacaattactgtaattggcatgtttgttattgtattgttccttgttttgtggacgagaagccgtaagaaagaaattgctgttttacttgcagttggtcgaagcaaggcagaaattgtcggacagttcctgacagaaaatatatggattgcaatactatctatgtttgcgtcaacggcattatcttttggacttgccaatcaaatcggttcattcattgtcagcagattgggagaaaatatatccaaattgaccgttcagattgccacatcagatatacttaaagtatttggcattggtgttattctgatttgtcttgcggttattgttgcttcctatacggtcatccgtttacaaccgaaagatattttaacaaaaatggaataggagaaatgtgattatgagtatattatcgttttcaaatttgagttatagctatgacaagaaaaagaacatatttagtaatatcagcgcagaaatggaactgggaaaaatatatgcgattttaggaccgtctggttgtggcaaaacaacattactttctttgttgggtggattagatagtcctaccaaaggaaagatattatttaatggagaagatattactgaaaaaggattcgcaaatcatcgccggaaccatgtttcctttattcttcaagcatataatctcattgattatatgacaccattagaaaacgtaaaattgacaagtaaattaccaccggaaccggttttagaaaaaatgggattgacgaaagaggaaatgaaacggaatgtgttacaactttccggcggtcaacaacaacgtgtagcgattgcaagggcattggcttcagaagcacccgttattttggctgatgaaccgacaggaaacctcgatgaagaaactgcaatgtccattatgcaaatactggaagacagtgtacaccagatgaacaaatgtgcagtcattgttactcattcaaatgaaattgcgaaaaaggcagatgttgtttttcaattaaaaaggggtacgctgcacatagtaaaaaataatgaaaaggtataaatggaaacatgggagatacgcaactattttgtgcaatctcccatgttcattttatgcaatcatttcttttctgtctctgactcccgaaacactttggatgccagaaatggaaggaagaagatactatagaaaataagatgtatcaaaaccgctttccattctatgacagctccggaaacagtgcctccactgatcagtcctgcaatattgttgttcataaaatgcaggatgacagggatccagatgttgtctgttttcatataagcaaaagcaaagaatacgctcagtgcaatacaggtgataagctgtgcggcaatactctgaagccttgtatcaggtgcatagtaaaacaggttcagcgggagatgccacaatccccagaatacaccaaggatgagaactccttttcgcattccaaaatgctcctgcaggatcggttgcaaaaagtaacgccatccatattcttctccgaaaaaggcggaaaagacgaggaaaaagctgacaaacaaagaaagcagtgacagccagaacatcggagaagcaaaaagagcgaggaaggaatctgcagtattgtctgtgaagctggaaatcagaagatttcctgtaaacagcatgaaaaacagaactacatacagaaagtgtcttctgctgtcaggcccggaccaggtcagtccccagataaagcggacttcacgtttgtcaagaagaaacaaaacccagagagccagattgccggcaattgtgagcatattgatgaccataacccacaggttggcatccggtataagtacactgagtacagagctgatggcaaacagtacagttagtacaaggtacccatagaaaaaccgccggggcatcggaaactctgtttttgtcagaagaaagacgacaatggctccggcagccggataatacatctgggcatttgcaaaaaaatctagagaagttccccgttgatatccgaacgccatcgggattcccatcagataaggaatgccaaaggcgatcaaagcaaagattagtaactgttttttctccagtctggtaaatggacgtttcataatgtaatctccttttctatatcttcagcattggctgtttatattcatttcgaaaagcggtcttatatttatccgtgatcacagactgatacagattggatgccaaaatatcatgtcggagcattttctgaccgatttcggagatactgtcagtatcggaaaggcgggtgagcagcggcagagcactttttttggcaatgacagaaagcagatcttgtctgtcttttcgaaaacctaaaagtttggcatagaaatgtccgccgttttccatatattctctcacgttgttttttttcagaccaagcataatatgcagaagtgcgcgattgattcttgtctgtgtcagctccctggtctttaataattcacagaactgcttatagttaaagaaatcattcagattgttctggattcggttggcaagtgtttcggaaacatccatatagcgaatgagactctgaggtgttttgttcaaaagcttatatttcatcagaagcgaaaaatcgttctgataaaccggatataacactttgtgataatcttttaaaagtgccaggcagctttttggcacctgatcttccagttcatttaaaatactggaaaatggtgtattttcgaaagtctctccggtaacctgctgtgtctggagtacagaactcgagtatgcaaggagagaacggatggcagaagccgaactgtaagtagagcgcagcgtctgatcgtggtagtcggattccatgcgcctgatcgtaaatggctgtatcctgcttttcacacgtcgcaatgcttttaaatattcgatccccagaatgttgttcggatcacttaataaaaaggaacagtctgaaattcccatgtaggaagacaacgcatcctggcgggcagcaggaaacgacatacctgctcttaaattttctttgagaaacttcgtatattcgtcaggctcatcacagaggatatcagcaatttttgtcagtccgtcaagatcattgcactcactgccaaagcagaggtaatctacaacgccgagctgatccagaaaggagacagctcccagcgcaaataattctgcagtggcggtcgcatagcagacaggcagctcaaagactgcacaggcaccgcattttaatgccatttccgcacgaagatgctttggcataatggcgggagtccctctctgcacgtagtctccgctcattaccacaatggctgcatcggcgcctgtgacttccagtgatttttggatatgatactggtgtccgttgtgaaaaggattgtattctgtgattaaaccgacaattttcataaaaatctccttgtatatcattttattacctattatactataaaaggacggcaagaacaaatcaaaaaaggtggatgtgattatggaatacgatgtattgttatcaatgctggaaaagcgggagtttaaagaattaaaagatgaaatggaaaacatgcaccctgtagatattgtggaaatgctggaggatggactggaatatggaaagatcgataaacgccagatgatcctgctctttagactgcttgcaaaagaagaggctgcagaagtgtttacagacatgaccagtgatactcgagaggtactgatcaatgcgctgacggattccgagctggaagaagtcatggaagagatgtatgtggatgatacagtagatgttctggaagagatgcctgctaatgtggtggacagactgttgatggcgacagacgaagagacgcggcagaagatcaatgcgcttttgaattatccggaagacagtgccggaagtattatgaatatcgattatatcagtctgaacaaagagatgactgtggcagatgccattttgaagatccgtcaggttggtattaataaagagacaatctatacctgttatgtgacagaaaagaaaaagctgattggtgttgtggatgtgaaggacattttaacatccggtgaatccagaaagattgaagagatcatggatgagaatgtcatttacgcaaagacgctggatgatcaggaggaagtggcagagacaatccggaagtacggactgatcgcgattccgatcattgaccatgagatgtgtatggtcgggattgtaacagtagacgacgctatgttcgttttgcaggatgaggcgacagaagatatcagtatcatggccggtgtcagtccgagtgaaggctcttatttcggaacctcggtatttcgacatgccaagaacagaagtctctggttaatgcttctgatgttatcagcgactgtgacaggagagatattggggcgatatgagagtgcgatggcagtaatgccggttctgatcacatttatcccgatgctgatgggaacaggaggaaactgcggatcccagagttctacactggtaattcggggaattgcagtaggtgaaattgagttcaaggacattttccgggtgatcttcaaagaggtgcggattgcacttgtagtcagtttgattctggcgatggtcaatgggcttcgcatctatattatgtacgatcaggatgtgatgctggcagtggcgatcggaattacgatgattgctgttgttgttatggcaaagacgatcggttgcgttttgcctctggctgcaaagaagatcggtctggatccggcgatcatggcggcacctttgatcactacaattctggatacctgtacgattctggtatatttccggatcgtaactgcgtttttccatatctgagatatattgacagaaaaaagacgatgtataacggagctttttggagtggactctaaaaagctccgttttttcttgaaaaaacggaaaagtcctgaaaaaaataagtaaaatactcgttaaatgtttgacgatattactgaaaagcatagagaaatagagaaaattgtacttaaaaatgcacataagagctacttgtatacaaaatttatttgcgttataataaagcaagtgaaacaaatgaaaggggctttaaacaatggcgtttattgatgaaattaaagcaagagcaaaagctgacaaaaagacaatcgttcttcctgagacagaagacgtaagaacttaccaggctgcagaggcagttttaagagaggggactgccgacctgatccttgtaggaagcaaggaagagatcgaaaagaacggagccggatttgatctcacaggagctgtgatcgtagatcctgctacaagcgacaagacagagagctatattgcaaaactggtagaactcagacagaaaaaaggaatgacagaagagcaggcaagagagattcttctgacaaactatctgtactacggtgttatgatggtgaagatgggagatgctgacggtatggtatccggagcatgtcattctacagcagatacacttcgtccgtgtctgcagatcctgaagacaaaaccgggaacaaaattagtatccgcattctttgtaatggtagtgccggattgcgatatgggtgcagacggtacatttatttttggagattccggactggagcagaatccggatcctgaaaagcttgcaaatatcgcactttcttctgcagaatctttcagaactctgacaggaaaagagccggttgtggcaatgctttcacattctacaaaaggaagtgcaaaacatgccgatgttgataaagttgtagaggctacaagacttgcaaaagagatggcaccggaactgaaactggatggagaactgcagcttgacgcagcgatcgttccggcagtaggagagtccaaagcacctggaagcccggttgcaggacatgcaaatgttctgatcttccctgatctggatgcaggaaatatcggatacaagcttgtacagaggcttgcaaaagcagaagcatatggtcctctgacacagggaattgcagcaccagtcaacgatctgtcccgcggatgcagcgcagaggatatcgaaggtgtagtagcgattacagcagtacaggctcaggcacagtaattgtttagaaaacttaaaatcagaatgaataaaatgacaaaattttcaggaggaaaaaaatgaacgtattagtaatcaactgtggaagttcttctttgaaattccagctgatcaatgcagaatctgaggaggttctggcaaaaggaatttgtgaaagaatcggaattgacggacgtctgacttatcagccggaaggtggagaaaaagaaaaatcagaaaaagcaatgccgactcacacagaggcgatccagtttgtgatcgaggctctgacaaatcctgagacaggtgttgtaaacagcctggatgagatcagagcagtgggacatcgtatggtacacggtggagaaaaatttgcttcttctgtagtgatcacagatgaagtgaaaaaagcggtagaagagtgcaatgatcttgcaccacttcacaatcctgcaaacctgatcggagttgcagcatgtgaaaatctgatgccgaacacaccgatggtagcagtgtttgataccgcattccatcagacaatgcctccaaaagcatacatgtacggacttccatatgaatactatgagaaatacaaagtaagacgttacggtttccacggaacaagccacagctttgtttctaagagagcggctgagttgttaggaaaagcatatgatgagacaaagacgatcgtatgccaccttggaaacggatctagcgtaacagctgttttaaacggtaaatccgtagatacatccatgggactgactccattggaaggacttgtaatgggaacacgctgtggagatatcgatcctgcgatcatggaatttttggcacacaagctggatctggatgttgacggcgttatgaagattttgaacaaggattctggagtatacggactgtccggcggactttccagcgatttccgtgatctgacagatgcctctctggcaggcgataagaaagcgcagatcgcaatggaagtattctcatacagagttgcaaaatatatcggtgcatacgtagctgttatgaatggtgtagatgacattgtatttacagcaggaatcggtgaaaatgatgatatcgtaagagaacaggtatgcagctacctgggttaccttggaatcgaattcaatacagaattaaacaaaggactcagaggaaaagaaacagagctctcaatgccgggatccaaagtaaaagtgtttgtgattcctacaaatgaagaacttgcgattgcacgcgagacactggaactggtgcgcaaataagcttctgaaaattttaaaaagtcagcagggttgcccgcaaaagcggacagcccttttcagcggaggatactgtttacagaagccggtgaataaaatataaaaatcttgttgacaaataggattaacatgatataatagtttaggtatgaataggagtaatgattatgttaattaacctatcagacgttttgtcagaacagcataagacagttgatgagacggtgcagttggagatggatacgtttcagtccagaacaggtacatttccgattgtgagtaaagaaccggttcatgttgttgcagagcatgtgaaaggcagagagcttcttattcatgtggatacagagttatgtattctgattccatgtgacagatgtcttgaagatgtgaagcaggagtttgacctgaactttacgaagcatgttgatttgaatgtttcggatgctgatctgggagaaggattagatgaatcaaacttcataagcggatatcatcttgacgtggacaaaatgctctataatgagatattgataggatggccgacgaaagttctatgcagtgaagactgtaagggcatttgcaacgtttgtggtcagaacctaaatatgggtacctgtaactgtgaagatacagctcttgacccaagaatgtcagttgtccgtgatttgtttaagaattttaaggaggtgtaacctatgtctatctgtccaaagaacaaatcttctaaagcaagaagagataagagaagagcaaactggaagatgagtgctccaaacctggtaaaatgcagcaaatgtggcgagcttatgatgcctcacagagtatgtaaagcatgcggagcatacaacaaacgtgaaatcgtttcagttgactaattgaaaatgatattaaggaatggggactttgcaaaaaagtccccatttttcgtatcttaaaatcagccttttatattgatttttgggatgatgtttagtagaatgtatgcagtagcgttaggaggaagagaaatgtctgatattacaagagttgcactggatgccatgggaggcgatcatgctcccgcagagatggtaaaaggtgcgatagaagctgttaataaaagagatgatattaagattctgctcacagggcaggaagcactgctgaaaaaggcgttatcagaatatacttatcccaaagaccggattgagatcattccggcatcggaagtgatcgaaacggcagagccgccggtcatggcgattcggagaaaaaaagattcttctatcgtagtagcgatgaatctggtgaaaaagggcgaagcagatgcatttgtatctgcaggaagttccggggcgattcttgtcggcggacaggtgatcgtaggaaggattaagggcgtggagagacctccgcttgcaccgctgatcccaacgatgaagggagtatctctcctgattgactgcggagcgaatgtagatgcaagaccgtctcatctggtgcagtttgcgaagatgggatcgatttacatggaacatgtggtaggaaagaagaatcccacagttggaatcgtgaatatcggtgcggaagaggaaaagggaaacgcgcttgtaaaagagacatttccgcttttaaaaaactgcagggatattaactttatcggcagcgtagaagcgagagatattccgtacggagctgcggatgtgatcgtttcggaagcgtttgtagggaatgtgatcctgaagctgtatgaaggtgtcggcggagctctgacgaagaagatcaaagccggcatgatgacgtctctgcgcagtaagatcggtgcgcttcttgtgaagccggcactgaaagctacattaaaggattttgatgccagcgagtatggaggagctcctcttctggggttgaatgggctggtcgtcaagactcacggaagttctacttcaaaagaagtatgtaattcaatcatccagtgtgtgacatttaaaaatcagcagatcaacgagaagatccgcgaatcgatccagtccgcacaggaagaaaaaaaagaagattaatgggacaaagaaaggaaagaaaactatggaatttgaaaaattacaggatattatcgcagacgtgctgaatgtttctaaggatgacattcatccggagactacatttgtggatgatttaggagctgactcactggatattttccagattatcatgggaattgaagaagaattcgacattgagatcgacaacgatgaggctgaaaagatttcaacagtgcaggatgcagtagaccagattaaaaaagtagtagaataaaaggcaagaagagatttttgtctctggcaatcggtttgggtgcgtgattctgtcgcgcacccaaactgtattattcaggccggaacaaaaagttttagataaagggaaaaatatgaagaaaaatttaaaagagctggaaaaaaagataggatatgagtttcaggatttttcattgctggagcaggcgatgatgcacagttcttatacaaatgaaaagcatctggaaaaatatcattgcaatgagagactggaatttttaggggatgcagttttagagctggtgtccagtgaatttttatttcttgaatcaccgaaagtatcggaaggaaagctgacaaaaacaagagcgagtatggtgtgtgagccttctctggcgttttgtgcgcgggagatcgaactgggcagttatctgcttctcggaaagggagaagaagcaacaggaggacgtcagcggccgtctgtgacatcggatgcgatggaggctctgatcggcgcgatttatctggacggtggttttactaatgcaaaagagttcattcatcggtttatcctgacagatctggagaacaaaaaactcttttatgatagcaagactattttgcaggagatcgtacaggctgatatggaagagggaatctcttatcacctgattaaagaagaaggtccggatcacaacaaatctttcactgtggaagtgaagatcggggagactgtctatggaacaggaagcggacggacgaaaaaagcagcggaacaggaagccgcttacaaggcaattctaaagctgaaaaaacaaaactaaagcgggtgttttatgtatttaaaatgtattgaggtacagggatttaaatctttcgccaatcggatcaaatttgagtttcacaatggaattacgggaatcgtgggcccaaacggaagtggaaagagcaatgtggcagatgcagtccgctgggtgctgggagagcagagagcaaagcagcttcgaggcggttccatgcaggatgtcattttttccggaacggaaaacagaaagccgttgagttatgcttcggtagccatcacactggacaattcagatcatcagctccctgtggattattcggaagtgacagtgacaagaaaactataccgctccggtgagagtgagtatctgatcaacggaaccggatgcagactcaaagatatcaatgagatgttttatgataccggaatcggaaaagaaggatattcgatcatcgggcagggacagatcgataagattctgagcggaaaaccggaagaaagaagagaattgtttgatgaggcagccggaattgtaaaattcaagcgccgcaaaacgctttccctgaaaaaactggaagaagaacagaacaatctgacccgggtcagtgatattctctcagagcttgagaaacagatcggaccgttggaaaagcagtctgcagtggcaaaagaatacctgaagaagaaggaagagctgaaggtttatgatattcatatgtttcttttggagacagagcgtttaaaggatcagcttcagaggctggaagaaaaagtccggattacctctgatgagatggaagcggcaaagagtcgctatgaagaaacaaaagaacaatatcaggctgtggagacacaggtggaagagattgatgcagcgatcgaaaaatcgaagaaccagctgaatgagacaacgcttttgaagcagcagctggaaggacagatcaatgttttaaaagagcagatcaatacagccaggatcaatgaagaacattatgcgaatcgccgccgtacgatccagcaggagtgggatgccaagaaggagcagaaagccggatttgtaaaggacagcgaagcgatccacggacagctggagcggatatccaatcaggatacggatgcaaaagagcagctgatccaggtgcagtcacagattgcagaagagacgatggaaatcgagcagagcaaagaagagattatgcggcttttgagcaatcgggcatcgacgcaggcgaagatccagcattttgataccacacagcagcagatcacgaccagaagggctcagatccacagagagattctggaagtgtccagtgaggcagagcagtatggacgggaattagagcagcaaagacggggattcgaagagatcacggcggagattcaagcgtttcaggatctgatttctgtcaatgaacagaacatcgcagagtttcagcgccaattggatgagaagcaggaaaaattgcggatcggtcagactgcatatcacagagaatcctccagactggagtcgctgaagaatattacagaacgatatgacggatacggaaacagcatccgtcgtgttatgagctgcaaggaccgggaaaaaggtctgatcggtgttgtagcggacatcatcaaggtagaaaaagaatatgaaattgcagtggagacagcgcttggaggcagtatccagaatattgtgacggacgatgaagagactgcaaagcggatgatcgcatatttgaagcagaataagtacggacgcgcgacatttctgcctctgacaagtatgcagggcggcgcagagctgcggcagatagatgcactaaaagaaacaggcgtgatcggacttgcccataccctggtgcatgtggaagagcgtttcctcggcctggccaaacagcttctcggtcggactattgtagtggagaatattgactgtggaatccggatcgcaagaaaatataagcaatccctccgactggttactctggaaggagagctgatcaatccgggaggttccatgaccggaggtgcgtttaagaactccagcaatctgttaagcagacgccgcgagatcgaggagtttgaaaaaacagtaaagttgttaaagcgtgacatggaagagatggagcactcgatcagtgcgatcaagacacagagagcagagtgttatgccgggatcgacgagatccagcagaagatcacagaagcatctgtccgtcagaacacggcacggatgaatgtggaacaggtgcaaaggcagcaggcggaatccagacaacgttgtgaaagctatgcaaaagaacaggaagaactggaaatatcgctgcgggagatccgtgaaaacggggagtcgattcaggttgaactggaagcgtcaaaaaaactggaagttgcactgaatcagaaaatcgaagaattgcagaagcagttggaaattcaccgcgaggcagaagctgcacagctgaaacagtctgaaaaggtacatttatcgctggcaggtttgcagcaacaggatctttttatcaaggagaatattgcacgtatcgatcaggagatgcttcgtttagagaaagaagccggagagctggatcagaataaaggaaatacagcggaagaaatcagtcagagagaagagaagattcaggagctgaaaaaaacaatcgaagaatccacagagatattttctgaaattgagacagaaatcacggcacagaccgaaaacagagaagcgctgaatcagaagcataaggcatttctggaacaaagagaagcgctgtccggtcatatggcagagctggataaagagttattcagacttgaaagccagaaagaggattgcgaggaagcgtccgaaaaacaaatgaactatatgtgggaagagtatgagattacctacaatggcgctttgaagctgagggatgagacactgacagaccgtgcatttatgaaaaaacagattctgtttttaaaaggagagatccgtaagcttggaaacgtcaatgtcaatgcgatcgaggattataagcaggttgccgagcgttatgaatttttaaaagaacagcatgaggatctggtcgaggcaaaagaaacgctgatccagattgttgcagagctggacgcggcaatgcgtgctcagtttgaggaacagtttgcaagaatatcaaaagagtttgatgcggtcttcaagcaactgttcggcggcggaaagggaacgctggaactgatggaagacgaggatatcctggaggcaggaattcggatcattgcgcagccgcctggaaaaaaactgcagaatatgatgcagctttccggtggagaaaaagcattgacagccatttcgctgttatttgcgatccagaatctgaaaccgtctccgttctgtcttctggatgagatcgaggcggcactggatgacagtaatgtagaccggtttgcgcagtatctgcacaagctgacaaaacatactcaatttatcgtcatcactcacagaagaggaacgatgacggcagcagacaggctctatggaatcaccatgcaggaaaaaggaatttccacactggtatctgtagatctgctggaggaagatctgacctgatgtcagaaaaaaggaaggagagcatatggaagagaagaaagggttttttagaagacttgtctcaggtctgacaaagacaagagataatatcgtatccggaatggacagtatttttcacggattttccaaaattgatgaggacttttatgaggagctggaagagactctgatcatgggagatctgggagtgcatactacgacggagattatagaggatctgcgccggaaagtgaaagagcagcatatcaaagaaccggctgcctgcagacagcttctgatcgacagtatcaaagagcagatggatgtgggagagactgcttacgaatttgaggagagacagtctgttgtatttgtgatcggagtcaacggagtgggaaagacgaccactattggaaaactggcagggaaattcagagagcagcataaaagagtcattctggcagctgcagatacatttcgtgcagctgctggagagcagttaaaagaatgggccaaccgtgcagaagtagagatgatcggcggccaggaaggtgcagatccggcttctgttgtatttgatgcagtggcagcggcgcgcgcaagaaaagcggatattttattgtgcgatacagcaggacgtcttcacaataaaaagaacttgatggaagaactgaaaaagatcaaccgtgtcattgaccgggaatattcggaagcatacagagagacactggttgttttggatgcgaccaccggacagaatgcactggctcaggcaagagagttcaatgaggttgcagatatcacaggtgtgatcctgacgaaaatggatggaacagccaaaggcggaatcgcagtggcgattcagtcagaacttggaattccggtcaaatatatcggggttggagaatctattgatgatctgcagaagtttgatgcagatgaatttgtcaatgcgttgttttacagtgattccaagacggaagaaacagaagaataaaaatatgtcaaaacgacagaaagagggatggaagatgttgactttggagaaatttgaagaagcaagtgaagtagtaaaacaggtgacgactccgacaaagctggtgtacagcgaatatctgagtgctcagacaggggccagaatttatctgaagccggaaaatatgcagcatacgggagcgtataagctgcgtggagcctactacaagatcagcacgttgtcagaagaagacagaaataaagggctgatcacagcatctgcaggaaatcatgcgcagggtgtggcatatgcggcaaaacgctatggatgcaaagcaacgatcgtaatgccgacaggaactcctctgattaaagtgaaccgtacaaagagctacggtgcagaagtgattcttcatggagatgtatacgatgatgcatgtgcgtatgcatataagcttgcggaagaacacggctatacgtttgtccatccttttgatgacctggatgtggcgaccgggcagggatcgatcgcaatggagatcattcaggagctcccgacggtggactatattctggttccgatcggcggcggcggactgatcacaggagtggcgacacttgccaagatgctcaatccaaagattcaggtgatcggtgtggagccgagagaagcggcgagcatgactgcggcgttaaaggccggagaagtggtggaacttccaagtgccaacacgattgcggacggtactgcggtaaaagcggtcggaaaacagaatctgccatatgtgcagaaatatgtagatcagattcttctggtggatgacgatgaattagtcggagcatttctggatatggtggagaaccataagatgatcgtagaaaattcaggactcctttctgtggcagcattaaaacagctggatttgaaaggcaaaaaagcggtttgcgtgttaagcggcggaaatatggatgtgatcaccatgtcttctatcgtacagcatggattgatccagagagaccgtattttctcggttgcagtgcttcttccggacaagccgggcgaactggtcagagtggcatcgatcattgcaaacgaaaaaggaaatgtcatcaaactggaacataatcagtttgtcagcaccaatcggaatgcggctgtggaactgcgtatcacgatggaggcattcggaacagagcataagcacaagattttgaatgcgttaaaagaagcagggtatgagccgaagaaagtcggagcgaagctgtactaaacaatatagaagaaaaaaattaaagtgtccgaatgacctgtgtgggagcggacactttttatatgaaaaggatggaaaatcagaagagaggcagtgtaaatgtatttagtatcgatttattttgatgaaaaaacgaccagtcgaattcagggatacatcactcaggttgcaaaaagaagcggaaatccatttatgattgagaaaaatgtacctccgcatttgacgatttctgcatttgaaacgcgaagcgaagatcaggtaatctcactgtttgaagaaacgagagatatgtttcaaagcggggagataatctggtgttcagtgggagcgtttttcccgaatgtgctgtatctttcaccggttttaaatacttacctgcaagaactgtcagagaaggtttataaggagttattgagaatagcggatgccagggtacacaaatgttatcgtccgatgcaatgggttccccacgcaacgatcggaaagaaactttctaaagaagagatgcttgcagcgtttcaggtattgcaggagcagtttggagtgttcagcagccgggtcgtgcggatcggtttggcaaaaacaaatccatatgaagagttgtggaatttggaattatgaaaatagcaagaaacaatttacccgaattgtacagactgaagtataggattttcggcaaacatttgttataatatagttgtcaggaggtagggagagaatgtgcagagagaaaagaaaactcccgataggaatagaaaattttgaacagatcatcaaagatgatttttattatgtagacaagacaggattgatctctggactgctccgcaactggggaatggtaaatttatttaccagaccaagacgttttggtaaatctctgaatatgagtatgctggaacacttttttctgtagagggcgactagagcatttttgatggattgaagatttcgaaagataaaaagttatgtgaagaatatataggaaagcatccagttatttccatctcactaaaaggcatcaatgctgcttcttatgaggctgcatttgagttaactgtcaagaccataaagggagcagtgcaaaaggcaggattccttaaaatgagtgataaactggacgaggacgagaagaaagaatatcgagcgattcttgatgaaaatatgagtgaggctacgcttttttggagcttaaaaaatttgtcagaacttttggagaaacactatgaaacaaaagtaatccttttgatcgatgaatatgatgttccattggcgaaagcgtttgaaaacggatattatgacaagatggtttttcttatccgtaatttactggaacagacgttgaagaccaataacagcctgaaatttgcagtaatgaccgggtgtatgcgaatatcgaaggaaagtatctttacgggactgaacaacctgaaagtgttgtcgattacagatgagcgttttgatgagtactttggatttacggatgaggatgtcaaagaaatgctgcggtattatgatcgggaagatcattatgaagaaatgagaaactggtatgatggatatcggtttggtagtacagatgtctattgtccatgggatgtattgaatcattgtgataaaataaaagagaatgctgcagcttttcctgaaaattattgggttcataccagtagtaatgaggcagtcaagaaaatcattcaaatgtcaggaaatattacaacaaagcgcgagattgaacgtttgctggcgggagaagaaattgtcaaagagattcggcaggaacttacttatcaggaaatgtatcagtctgtggaaaatatctggagtcttttatttatgaccggatatctaacacaaaggcagcgactggatgccagtcattacaaacttgcaattccgaatctggaagtacgggatatttttaaaacgcagatcatggaatattttaaggaaggtgttgcaaaagacggagatacgttaaaacagctctgtgatgcactgaaaggcggagatgcagaaaaagtagaacgtctttttgaagggtacttgaaaaagacaatcagtattcgagatacatttgtggagaaatcattaaaagagaatttctaccatggaattttgctcggcattttaggtgtcaaagaagactggggagtattctcaaacagggaaaccggggacgggtacagtgatattatgatagaaacagaggacagtgaaatggggatcatcattgaaatcaagtatgccggagacgggaatcttctgaatgcctgcgaaaaagccctgaaacaagtagaggaaacgaagtatgaggagacgcttttagaaaacggagtggagaaaatattaaaatatgggattgcttgttatatgaaacattgtaaagtcatgtgttcggagagataacaggcttgaaacattggtgaaatataaaatgggaacttcacagaatggattaaaatgaagtttttttgtgaaggttggtaaaaagaaacggagaggtggattatggcatcaagtaaagaatatttgcaatttattttagggcagttgtctgagttggaagaaatcaattacagggcaatgatgggagagtttattctctattatagagggaagatcgttggtggtatctacgacgacagactgctgatcaaacctgtaagctcagcgatttcctatatgccgacaatttcttatgaattgccttatgaaggagtaaaagaaatgctgttagtagatgaggttgatagtaaacaatttttgacaggtctatttaaggccatgtatgaggaattgcctgcgccaaagccgagaaagaggaaataaaaattgaaatcgatggaggtagttggatgacgttttatgaacagatggtttcccactttctgctttgctggaaaaagacgagaccttaaatgcaccaatttatggaacgctgctgcaaaagagggatcactcctttggatactttggcctgacagaaaatgcattgctggtatcttttggggtatatttatagtatttaaaaaaactatcttcatgtaaatattcgaatcctattttttcaagaacatgttggctacgagtatttcttaaaaccacatcagcataaatggccgataatcctaattctttaaatccgtactctaagacagttctttccaccgctgtgtcatagcctttttctttatagcaatcttgaataagcacaatggaaagggtgccactacctttttgtaagtctatgtttttaaggtatacatcaccaattacaatatcatctaataatatagcaaaccatactctgttgcaattatttgcttttctttcaaaatctttttgagcgatctctggcgtataaatgtaaggtgtttcgcacatcataggatctgctatataattttttcatgtttatattactcccttaacttccattaatccaagatattttttatacggaaagatgccttaattatactgtgagattctttttttgtctattgacgctatttatgaattacaggaatgcgtctatctctttttagatttcaaattgttcgcttggtatcgactaaagttttcttgacttttatctattacagttgtaagatttaatagaaacttacaattgtaatatttgagaggatatgtgtatgaagcgaaaagtgattgcactactggttatatgtgtgatggttctatctgggtgtggtaagacaactccggaagaaaagagcgaggaaactgttcaagatattcagcagaaggagattgctgatgattttgaagagttgatggaaggaacgagagaattatatgaaaaggcagcagaaaacaagctgctggacagtctggagtttcaaaagcaagtaattgattatctgggacaaaagggatatgccgcagtagatatgaaagatcaagttgatatggttcattcagagcaggtggaaacatattgtgagaaggcaaaaaggggagaatcggcagatgtggtgatatattctgtcatagaacagggtggtgtagttcgttatgaactgcatacagatggtgatgatatggatgccattgtcagcacagttcgctggacggataacaaaccctgtatgatttattatcacaaatttaaggtacattcctggaaatatacagaaaaaggatattttttcatcgaagaatatcatcccccgggatttgacggaccgccgagagagaaaggatttcgtgtaaaaccgttggatcagaaacttagagaattaaatcaaaaatatgtacttccaattggatataggttgaataatatgctgatcacaaactgaaaggaagaggattattcaaacctgaatttttatgatctatatgaattaaagtatccgagtatctatggaaaagagattccgtatgcgatgaaagagggggtggaatatcagataccgaaagaagagtttgaaagtgtattacaaacactttttccaatcacgagtgagcagattcagaaaaatgcagtttataatcccgatacgcagagctatcgttatcgtccgaggggactccatgattgtgagtttccttatgaaccgtatccggaagtgatttcttatgaagaactgggtgatggaaaattaaaacttgtggtagaagctgtttgggaaattgaaatgctggatcaggcatttcgaagcgaattagttgtggaaccacttgaaggtggaaaaattcattatgtgtcaaatacaattttgtcaccagaagaagatgagccgaggtggtatgtaccaagattgacagatgaacagtggagagaggcttatgaataaaaaacgaagagttgttttagttgttttggttttcggcatattgttatgtgcgtgcagcgataagaacctggaaatttctgaaaaacgaaaagcagaaagttcagatgaaaacaaagaggcttatgaaaagggatatcatcttccgattaaaaaggaagagcgtgagaaggcagaaaaagacagtattgctgccttgaagttggttcaagatatttatgctgaagcggataagggagatgcatcgaatgtagttcttacagattctgttatggagcagatgaaaaagatactcggcagaggggggagttccggtaattagttctgaggaatactctgttatggaaaattatcaggtgatggaaaacttcttacacagttcggagcagggagttgaaggaaatgtaattttatatgatattttacaagacggaagtattgagagaagaaaatatctttatgacgggaaagagatgtatctgttagcagtcagagcagtttggaatgaggaaggagatccggtgattgcatatcgctcttacacaagaatgaaagaatggagatacacagaaaagggatggtttgcttatgaattgtgtgtaccggaaccgacggaagtatcagaaattgtggatggaagttgtatgatcagggtaaaaccgttagatgcagaatgtattgaattgtcaaaaaaatgtgtgttgccattgggatatcaaggaaataatttactatgttctaattgggatcgtgaacatttagaggggctggattacaatgggctatatgaatacctctaccagatgaaatatcaaaaaagatttgttatggaagaaggaaaaaatggaatccccgcagaggaatttgaacaactgatgtcagaatatcttcctgttactgcagaacagttgcggaatatagctacatttgatgcagaaaaacaagagtatgtatgggcaaagcttggatgtggcaattacgcaccgactcattttggaacttctttaccagaagtaataaaagtagaggaacatcaagatggggcgcttactttgacagtggaggcggtttgtgatatggtcatttccaatgacgcagtgattacacatgaacttactgtgaaatttcgagaggatggaagttttcaatatttgggaaataaggttttagaagatggaatccatcagattccacaatatcagtatcgaattgcgaggtgacatccgattgaacaacaaaaagaaccgaacaggagttatttttgaaatctgtcggttctttcgctttttatttcccaatatttaattccgagagcacagaagttgtgatttcggttgctttacttccggtagtttcggtttctccctgaatatttgttgcaaaataatatacattgtctgcggtttccaaaaaaccgataaaccagccatttacatcttttccatcaatccgcccagttccggtttttccataaagagaacttttggaaccggaagagagaaggatggaatttttgacagcgtctatattttgtggagcaaattgaaactcgttgtcatggaatttttttaacaggttgacctgctcaatcggagagatttttaaagataaatctgtccagtataagtcgatgtctgaaccggtctgttgatttccgtattgaatcttctgtaaaaatgattttacagagtgaaatcctaattgtgaatcaatggattgaaagtaccagttcacagagtttttcatggcagaagataaggtctgattggcttcccatgcatcgaatggataatcttcgccattccaggtcatatctgaatcttcaggagtgatgataccggattctaaaccgagtaaggcatcgtatatcttgtaagtagagtttggggcgattcgttctttggcattttcgatgttaaaaatattccaggcgttttgatttgtatcatataaaacgaaactgccttgatagccattgaaatgattggaaagatcaatggtggaaatatttttcatatcgtttggcaatcggtattcattttgcggagaacctgcggcagccagtacaggtgcatagctcaatgatagaaatgcaatgaggatataaatgagaaatccccgcgcttttccccgttttgtttctttttgaaaggcagcgatattgagaatcctccgtttaatctgcttcatacttccactcatcccagttgcataaggaaaaggaatgtgagaaattttttcggcaaaattgatcagtgtgtttccataggcctgataatctgtttcgtcaagaagatgcagcacagccgaatcacaggaaagttcacgatcacatcgcatttcctttaaggcataccagacaaaaggattaaaccaatatagaataccagccaaattcataaggaaaacaatgcgcgtatctttttgacggcaatgctgtaattcatgcaaaagcatgaagcgcatatcctttgcattaaaatctgaaatcaaatgaatcggaaggtaaatgcgagggtgtatgagccccacagtaacaggtgatttcaaaaatgcggtactgtatatcgggattttctttttgcaatgcatctctttacaacagttttcatagagccgttttacttgttgagtttgtaatggcagtgcagattgttccaaagtgcggagccttaaaaaagaacgtgcagctaaaacgaacattgtgacagcaccgacagcccataaactaaaaaggagtaagtgaacaggagaggatgttttactgctgattgagactgcaaaatcatttactttttcaatggcagaatgttcttttatgaaaacctgtccatcaggaacagagagaaaaagtcttttcggaaaatctgaaaggtgcaaggctggaaatttctgcaagatagagaaaatgtttgcaggtaaaaaagggacagccatgaaactgagcagaagagaccaaaggcgatactgcatgcgggcagataaacatttccgcaataagtgttttatgcctgtcatgattccaatgaaaatggaaataaaaatattgcatattaaaaaatggattccaaaatcaaacaaataaattcctcctattcgtgagtatcagagagaagatgacgcaaggtatcaagttctgttttggataatttatcatcttctaagtaagaggtaagcatagaaacgatgtttccattgtaatatttgtttaaaaaagaattgctttcctgacggatatattcagttttcggaactaaagaggtatatacaaagactctgctttgtttttcataagtaagcgctttttttgttacaagccgcttcaacattgtttgtattgtctttggactccagtcggttgtctgagtcagtttttcagtcacttcatttgtactgatgggagcatacttccaaatgaccttcatcacttcaaattcagcttcagaaatttgtggcagtttactcatattcattcctccaagtcttacatatgtaataaaaatattataaggggattttataagaaagtcaaacaatgaaaaatattgacagaaaatcttacgtccgtaataatataaatgttatgaatgccatttcccgattttgcagggcggtgtctgcagcttcacatccagctttatgatgtgtaagctcatcgacacaaagcgcgaaataagaaattcaggaggtgctgtgaagggatttgaacgaaaaagttgatagaaaatataaactccggaaagaagtcaaaaattctctccggagtttatgcgttctgttttatctatacctgatgatatttctggagcaatttatggatcttatctgttggattcataacagcaccgatcgtcagatcgtgattcagggaatcaatgatcagagccaggaatttactcatgtctgccttgacaaagtattctctttcgtctacagcaggcggcagatatgtcaggttggttgttacgactttatcaagatatccctttttgtagtattcatcgaatttttcaaatccgtctgtgaacagtccgaatgtggtgcatacgaatacgcgggctgcgttgcggtcttttaatttctttgcaacatccagcatactctcaccggaggagatcatatcatccacgatgatcacatctttgcctgccacatcatctccgaggaattcatgtgctacgatcggattctttccatttacgatagtagagtagtctcttctcttataaaacatacccatatccactccaagcacgttggagaagtatacagcacggtgcattgctccttcgtcagggctgacgatcatcagatggtctttgctgactttcagatccggaactgcacggaagagtgctttcataaactgatactgaggagtaaagttgtcgaatccgctcagaggaatcgcattctgtacacgcgggtcatgtgcatcaaatgtcagaatgtttgcaacgcccatatcttttaattcttccaatgccagagcacagtccagagattctcttttggttctcttatgctgacggctctcgtaaaggaatggcatgatgacattgacgcggtgtgcttttccggtagacgctgcaatgacacgcttgatatcctgaaaatgatcgtccggagacatgtggttgaggtgtccgttgacagagtaagtcagactgtagttgcatacatctgacataatgaagagatcagttccccggatggtctctttgatcacaccttttgcttctccgcttccgaaacgcgggcagttacattctaccagatagttatttgtgcggtaattcacatacaatggggactctgtcacctcattgatggtgttttcacggaaagatacgatatagtcgttgactttctgtgccagttctttacagctttccaatgctgcaagtttcaatggagcaactggaagggttttttccaataattcaatatttgccatgattttctcctgtgttttcgtttttccatatccgacctccggatatgcgatttcatatatcgttatatcattttttgcagggaaattcaagcatggctttgctatagaagaaaattatgctatactggtactgttaatatgccagaagtatgagcagacaggaactttgtttcggtaaaaagcaggagacaaagtctaaaaatagaagaagtacaaggagtttgaaaatgaaaaagcacgagcatattgtgaagtctctgatgcccggcgggattggagaagaactggggatcgagccgggagataagctgcttgccatcaacggaaatgagatacaggatgtatttgactattattactatgaagagagtgaacagcttctgcttctgatcgagaagccggacggggaagagtgggagctggaaattgagaaggatgaggatgaaagtctggggatcgagtttgaccagagtctgatggatgagtaccgttcctgcagaaataaatgtatgttctgtttcattgaccagatgccaaagggaatgcgggagacactatattttaaagacgatgattcccgtttgtcatttttgcagggcaattatattacgttgaccaatatgagtgatcatgatgtggagcgtattgtaaagtaccgtctggagccaatcaatatttcgttccagacgacaaatccccagcttcgctgcaagatgctgcacaaccggtttgcgggagaggcgctgaaaaaagtagatattctctaccggggacagattgagatgaatgggcagatcgttctctgcaagggagtaaatgacggagaagagctggagcggacgatccgggatctgacaggatatctgccgtatttaaagagtgtttcgatcgttccggtaggactgacaaaataccgggacggactgtatcctctggagccgtttacaaaagaagatgccagggaggtgctttctgtcatccaccgctggcaggagaagatctatcaggagcatgggatccacatgatccatgcgggagacgagtggtatgtgctggcagaggaggaggtgccggaggaagaacgatatgacggctacctgcagctggagaacggtgtgggaatgatgcgtctgttgttcaacgaagtacaggaggctctctctgccgtgacaggagatgaaaggcagcgggagatttctctggctacgggacgtctgatgtatccttatatcggaaagatcttggaggagatcagaaagaaattcccgaatatcaccacacatttatatgcgatccgcaatgacttttttggagagcggatcacagtatcaggtctgatcacagggaaggatctgacgggacagctgaaaggacagcctctcggggagagacttctgcttccgtgtaatatgctgaagatcggagaaccggtctttctggatgattttacgctggaggaagtggagaattctttacaagtgaagacagatattgtaaaatcaagcgggcaggatctgctggatgcagtgatcggtgtttatgagaatgatgatttcagcacggacagaagaagaggcagatttcaggaaatgtaagattgaatggagagaaaggtagttgaaaatatgagtaaaccagtagtagcgattgtaggaagaccgaatgtgggaaagtctacactgtttaatacattagccggggagcggatttcgatcgtaaaagacactccgggtgtaacaagagaccgtatttatgcggatgtatcatggttggacaaagaatttacgatgatcgataccggcggaattgagccggacagcagcgatatcattctttcacagatgagagagcaggcgcagatcgccattgatacggcagatgtcattgtgttcattaccgatgtgcgtcaggggcttgtggatgcagattccaaagtggcagatatgctcagacgttctaaaaaaccggttgtgcttgttgtcaacaaggtggataattttgataaatttatgccggatgtgtatgagttctataatcttggaatcggggatccggttccgatctctgcggcgtccaggctgggaatcggtgatatgctggatgaagtggtttcgcattttccggaaggagcaggagagaccgaagaggacgagcgtccgaagatcgccattgtcggaaagccgaatgtgggaaaatcttcgatcgtcaataagcttctcggagaaaaccgtgtgatcgtatcagatatcgcgggcaccacaagagatgccattgatacggcgatcaaacacgaggacagagaatatatttttatcgataccgcaggactgcgaagaagaaataagatcaaggaagaactggagagattcagtatcattcgtactgtaacggcagtagagagagctgatgtggtgctgatggtgatcgatgccacagaaggggttacagagcaggatgccaagattgccggaatcgcacatgagcgcggaaaaggtgtgatcatcgttgtaaacaaatgggatgccattgagaagaatgacaagaccatgaaacaatatgaaaatgatatccggacgacacttgcgtatatgccatacgcagagatcatgtatgtttctgcaaaaacaggacagcgtctgaataaactgtatgatatgatcgatatggtcattgacagccagacacttcggattcagaccggtgtgctcaatgagattatgatggaggccgttgccatgcagcagccgccgtcagacaagggaaaacgtctgaagctttactatatcacccaggtatcggtaaaaccaccgacctttgtaatttttgtaaatgacaaagaactgatgcatttttcttatacccgttatctggaaaacaagatccgggaagcgttcgggttcaggggaacgtctctgaaattctttatccgggagagaaaggaaaaggatcagtagatatggaacgaattatctgtcttatcataggatatgcgttcggcctgtttcagaccggatattttgtggggaaactcaatcatgtggacatcagaaaaacaggaagcggaaactcgggttctacgaatgcactgcgtgtgcttggagtaaaagccggactgatgacgtttgcgggagatgttttaaaatgtgtcctgccaattcttctggtgcgccagatcttcagtggcagcgattgtctgccgctgcttgcgatgtatacaggagcaggtgccacacttggacataattatccgttttatctgaaatttaaagggggcaaagggattgcggttctggccgggcttgtgctttccaccaagctctggatggttccgatcccacttgctgcatttatttttgtggtggcagtcacccgctatgtttccgcagggtcacttctggtaacaattatttttcttgcagaggtgatatgtttcgggcagatggggggatttgcgatggcgcagccttatgtgtacgaattatatctggtgacgtttttactgatggcactggcatggtggaggcatcgtgcaaatataaagagactgttgaatggaacagagaacaaaatcggttcttctaaaaaatagagacgattaaaaaggaggcagaatatggcaaatataggtgtgttgggagcgggaagctggggaacggcactctccgtcctgctgcatgataatggaaatcaggtaacgatctggtcgatcgatcccgccgaggtagagatgctgtcaaaagaaagagagcataagacaaagctgccgggagttcagatctctgaggaaattcagattaccggagagatacaagaggcaatcctggaaaaagactttctcgtcctggcagttccgtctccgtttacaagagcgactgcgaaaaagatgagtccatatgtggcagaagggcaaatgatcgtggatgtggcaaaagggatcgaagagaccacgttgatgacactttccgagcagattaaagaagagattccgcaggcggatgtggcagttctttccggaccgagccacgcggaagaggtcgggagaaagttgccgacaacctgtgtgatcggtgcgacgacaagaaagacggccgagtatctgcagtctgtatttatgagtaaggtgttccgtgtctatacaagtccggatattctggggatcgagctgggaggatcattgaaaaacgtgatcgctctggcagcgggaatcgcagacggacttggttatggagataacacaaaagcggcgttgatcactcgaggaattgcggaaattgcgcgtttgggtgtaaaaatgggcggtaagctcgagacatttaccgggctgaccggaatcggagatctgatcgtgacctgtgcgagtgtgcatagccggaaccgcagagccggatacctcatgggacagggaaagaccatgcaggaggccatggatgaagtgcagatggtagtggaaggtgtgtattctgcaaaggcagccagaaagctggcagagaaatatgaggtgtccatgccgatcgtggaacagatcaatgaagtactgtttgaaaacaagagtgctgcacaggcagtggatgaactgatgcttcgagaatcaaaaagtgagcattccgtgctgccgtggccggatgagacagtatagttttttaaaattcaaaagaatagagtcggaataatcccctttgtttctgcatagattggtatcagcagaacaagggggtattttttatggatgcatttcaggtatacaaggatatgaaagcaaggaccaacggggaaatctatattggagttgtaggtccggttcggacaggcaagtcaacatttatcaagcggttcatggatcttctcgtgctgccgaatatgacggatgaacacgcaaaagagcggacaaaagacgaacttccgcagtcagcctccggaacaacgatcatgacaacagagccgaaatttgttccgaaagatgcggcatctgtcaggctgtccgaagacgtggaagttaagattcgactgatcgactgtgtcggatatatggtagacggggcgagcggtcatatagaaaacgatgtggaacgtcaggtgaaaacgccatggtttgaacatgagatcccctttacaaaagcggcagcgatcgggacacagaaggtgattcatgaccatgcgacaattgggctggttatcacaacagatggaagtatcggagagcttccgagagaaaattatattttggcagaagaaaagaccattcaggaattgaaatccatcggaaagccgtttctgatccttttgaacacacagaagccatacagcgaagaaacaaaaagtcttcaggggaaaatggaggaaaagtacggagtatctgttcttgcggtcaactgtgcgcagcttcggacagaagatattaatcagatcatgcggcaggtgttgtatgagtttccaatttcagaagcagaattttatattccgaagtgggtggaaatgctgccaaaggatcacccggtaaaaagcgaggtgctctccagtgtaagaaatctgctggatggaatggatgacattcgaagtgtggcagaggcggtaccggtaagtgacagcgagtacatagagaagatcaggatctctcagattgaaatggatacgggaatcgtaaagatccagatggacttgaaggagaagtattattatgaggtgctcagtgaactgacagggacgaagattcagggagaatatgaactgatcgcagcgatgaaagaacttgctgcaatgaaagaggaatatacacagatcaaagatgcgtttgcagatgtgaaaatgaaaggatacggtgtagttagtccgaagaaagaggaaattctgttagatgagcctgcgatcatcaaacagggtagtaaatatggtgtgaagatcagatcagaggctccgtctgttcatatgatccgtgccaatattgagactgagatcgcaccgatcgtgggaagtgaaaagcaggcacaggatctggtggaatatatcaaagcagagagtgagactccggagggagtctggggaaccaacatatttggaaaatctgtagaagagctggtgctggatgggatgcgcaataagatcaatatgatcaacgaggagagtcaggtgaagctccaggatacgatgcagaagatcgtcaatgacagtaatggaggactggtctgcattattatctgatttttttgtttttttctgccggatgcttggactcttattctcagatgtggtacaataaagcggcagagtgttctctgcattacagaatttagttgagaccggagtacaagaaaggggtacgaatctatgaaagcggctatttttacgttggatacagaaagttataaagcaagaaaggcaagtgcggcagggatggttttaaagaaactgctggaacagtccgggtttgagactgctgccgtgcgtgtgatcccgaaagaccggaaagtggcggcatcggtattaaaaagagtggcagaggagcagaccgcagagttggttctgacaacaggagcagcaggacatctcgagagcgactgtgcaccatatgcactgatggatgtggcagaacgccttcttccggggatcccggagacactgcgtgcattccgcaaccgggattctcagcaggcggttctggactgcagtgcggcaggtgtgtgcaaaaagacgctgatggtaaatcttccgggagatgccaaagaggcaaaggaagcactggaatttattcttccggaattaaaacgtgcgattgagatgttgaacgtatgatgcgggtgacatatctcggacacagtggatttcttctggagatggaggatgccctgtttttgtttgattattatcagggcagtctccccgaaatggatccggaaaaaacattgtttgtatttgtgagtcatgtacattatgatcattataatccggacattttgaaattgcgccgtcagagacagaacatctggtatcttttttctgatgatgtgccgatgccggatgaacagaaacaggtaatccggctgtcgcccgaagaagagaggcgtgtgaatggcatccgggtgcgtacactgccatctacagatgaaggagtcgcattctggatagaatatcagggaatcgtgatttatcacgcaggagatttgaactggtggcactgggaaggagaaccaaagtcgtataacgagcagatgagagcggattatcagaaggcgattggagagcttccggatcagccgatcgatgttgcatttgtgccggcggatctccgtctgggtgagcagtatgtctggggactggactattttatgcgtcatacagacacgaaaaatgtgttcccgatgcatttctggggatcctatgaagtgtttgacaggctttttcacgaaccgtgtacaacagaatatagaagcagaatccgagagattcagacagaaggacaggtgtttgacattcagagtcagacatagtataatgaagaacagtgttaagtaagacagacaatcgcggctgcatgcgccgaaaggccgcagacgaggaaagtccgggcttcgcagggcaggatgccggataacgtccggtggaggtgactctaaggccagtgcaacagaaataaaccgcctgtattttgtgcaggtaagggtggaaaggcagtgtaagagactaccgcccttctggtaacagaaggggcacatgtaaaccccatccgaagcaagaccgaataaaagctatgcggctgcccgtcgcgctttaggtaggttgcttgaacctgacggcaacgtcaggtctagatagatgattgtccaatgacataacccggcttatcgttttgcttaatttgatgctgtcgctttgcggcagcattttgcatatgaacagagattttatacaaggcaggaaaagagtatgggaatgagaatcaatacaacgctgccgcttccggcagaattgaaagcagagtatccgctttcaaaggaacttacagaaatcaagaaaaaaagggatgctgaaatccgggacatttttacaggaaagtcagacaagtttgtcgtgatcgtagggccatgttccgcagacaatgaagattccgtgtgtgaatatataagcaggctggcaaaagtgaatgaaaaagtatcagaccgcctgatgattattccgcggatctacacgaacaaaccaaggacaacaggtgagggatataaaggaatgcttcatcagccaaaaccggatcaggcgccggatctgctggctggaattattgcgatccgtaagatgcatatccgtgccataggagaaagcggactgacaagcgcggatgagatgctgtatccggagaacagaagctatctggatgatatcttatcttatgaggcgatcggggcgcgttctgttgaaaaccagcaacacagactgacggccagcggtatggatattccggtggggatgaaaaatccgaccagtggtgatttttctgtgatgctcaactccgtgatcgcggcacagagttcccatacttttatttacagaggcatggatgtaacgacagatggaaacgatctggcacatgtgattctgcgcggcggagtggacaagtatggtacttgtaatccaaattatcactatgaggatctgatccgtcttcaggcgatgtatggagagaaacatctggccaatccggcagcgatcgtcgatgccaatcattcgaattccaacaagcagttcaaagagcagatccgcattgtcagtgaggtgcttcacagccggaattacaatacaaaattaaaagagctgatcaaaggtgtgatgattgaaagttatctggaagaaggatgtcagagtatcggggcagaccagatttacggaaagtccattacagacccgtgtcttggatgggaagatacagagcgattgatttataaaatagcagaagagtgctagaagggaggcacatgatgagaaggcagatgcttggaaaaagtatgctggaagttccggtagttgcagctggatgtatgcgtattcagggaatggatgagacagaggtggatgagtatatccatacctgtctggaactgggaattcagttttttgatcatgcggatatttatggaaaaggggcatgcgaatctctgttcggacgtgtattcgagcagacagaatttcgcagagaagatatcatcctgcagtctaaatgcgggattgtaccgggtgtgatgtatgacttttccaaagaacatattttgcagtcggtagaggaatctctccgcaggctgcgtactgattatctggatatcctgcttcttcacagaccggatgcactgatggagccggaagaagtggcagaagcaattgatctgttggagggatccggaaaggtgagacatttcggtgtttccaatcatacgccgatgcagatccagcttttgaaaaaatgtgtgagacaggatcttcttgtcaatcagcttcagttcagtattccgttttctaacatggttgcatcaggacttgaggcaaatatgctgacagatggtgccgtcaaccgagacaacagcgtgctggatttttgcagactgcatgatatgacgattcaggcatggtctccgttccagtatggatttttcgaaggggtatttgttgacagtgagaaatatccggaattaaatcaggtgctggcggatcttgcggaaaaatatgggacaacaaagactggtatcgcatctgcatggatattcagacatctggcaaagattcagatggtagcaggtacgaccaatctgaagcgattgcgggagatcgcgctggcggcagatatccggctgaccagagaagaatggtatcagttatatttaagtgcgggacatatactgccatagaattttgagataaataacgggaacgtgatctgtaaaaaccacgttcccgtttgttttttttgtttatcttccggagtatttttcttcgcagtatttgcagcggtacacctggttctcttcgtctgtcaggacaaagatgtgatccagttcctgctcgatggatgtgatacatcttgggtttttacagcggatcacattggtgatctcttttggaagtcttaggatttttttgtcgacgacctgttcattggagataatattgactgtgatattgtggtcgataaatccgagaatatcaaggtccataaaatcgatcggacactcgatcttcatgatgtctttttttcccattttactgctgcgggcatttttgatgatcgcaacacagcagtccagtttatcgaggtgaagatatttgtaaatatccatactttttcctgcttcgatgtgatccagaacaaaaccttcagaaatacgtcctacgttcaatgtatttttcaaattagataccttctttctttatgcgaaacaaatttttgttactctacatgaatatcaagcagtgtcagaatcagtgccatacgtacataaacaccatactgtacctgtctgaaataagctgctcgcggatcatcgtctacttccacagaaatctcgttgacacgtggcagtggatgcagtacaaacatatcggaaggagccagctgcattttctttttgtccaggatatagaaatctttcatgcggacataatcttcttcgttgaagaaacgttctttttgtacacgtgtcatgtataggatatcaagttccggcatggcgtcttccagacggacaacttccttgtattcgatatggtttttatccagaacatcctgacggatatagcttggaagacgtaattcttctggtgagatcaaaacaaatctgattccctcatagcgcaccagagcgtggatcagagaatgtacggtacgtccgaattttaagtcaccgcaaagtccgatcgtcatatgatcaaggcgtccttttacggaacggatagtcaaaaggtcagtcagtgtctgggttggatgctgatgtcctccgtctcctgcgttgatgacaggaatggaagcgtgcttacaggcaaccatcggcgctccttcctttggatggcgcatagcaacgatatctgcataacaagaaacggtgcggatcgtatctgaaacactctctccttttgaggcagagctggaatctgcggaagaaaatcccatgatgcttccgcccagattgagcatcgcagcctcatggcttaaacgtgtacgcgtacttggttcataaaataaagtagccagcttcttcccttcacatgcatgtgcatatttttccgggtgtttttcaatgtctcccgccagatttaacagtgtttccagttcctctacagaaaaatccagaggactcatcaaatgtctcatatgtaacctccttgtaaatcagatcttgtttgagagcagaatctgattatcgatattgtaataaatcttcaacagttttgcgttttggtgcagatggctcgatatcaggatatccaagtgcaatcaatgcagccagttcccgttcctttggaatgtccagaagactggaaattccactctcatcaaatacgcccataatgacagtacccagtccgtattcgtgcgcagccagacagaacgtctgacaggccacaccggcatcaaacatctgccagcggtctttttttccagtggtataagagccgtcgcgctcaaaaccgcaccgtcctttgatataagtgacagcaatcaaaaccggtgtctggcggatgatatctgaattgtaagatggggtaaagtcatcagcaatttttcccagaagggaaggatcctcaattgcgatataacgggtaatctgagtatttttccaggatggggaaaaagaagctgcggaaatgatctcttcaaccaatgaatgtttaacagaatccggtttgaatctgcggatgcttctgcggcttttgatacaatcaactgtattcatttcgatgtacctccctatgcaaaatctcttcaatcatcatatactaaactgtgagttttttcaacagagaattcatacgaaaattaagaaagaagcagaaaaaatctggacagagattgtaaattgtaatttaaaatttgttaatggtttgtaaagaagcctaaaacaaaaaaatcaggtgttataataccaatgcaaaagtgaaaaaagaaggagaaatgtaaaatgaagaagagagtcattgcggtgttgatttccgccatactgctttaccagccattatcagtatctgcagcagcagctccagatggaatgacagatgcaagcaaaacaccagcggcacaaaacggagcatgggatgcatggtgtgaggaatgggaaacaataaaaacagactggacacaggtcgccatgtcacctggatccgatgaaacagaaatgaattttgcatggtatacgaaagaaggggaagaagcgtcctttgtatatggacagactccggatctaagtgatgggcaaagtgcagcagtatcagaaagtccggcacagacaggttataagagcagcaaagtggtaataaaggatttgaagcccggaactacgtactattatcaggtgggcggaaaagagatttgctcctttactacggatgcggatacaagttccttttcctttattttcgtaggagatccgcagattggttcttccaatccggaaaaagcaaagactccggaggatattttaaaaccatcctttgcggcagcacagtcagaagcagttagaaatgatacctttaactggaatgatacattgacaaaagcgtatgaaaaaacaaacagattggcatcctttgttctttcttctggagatcagattcagacaaatgccaaaaaagtgcaggatacaacaatcagtgaggtggaatatgcaggatatttgagcccggatcttatgaaaagtgtacccgtcgcaacaacggtaggaaatcatgatgcagacaatgccaattatacgtatcattttaatccggcaaacagcagttctcttggcgacaatggaacagtaggcggagattattactacacatatggggacgccctgtttatgattttaaatacgcaggatacaaatgtggaggaacatcgtcagtttatcgaatccacagtagcggcaaatacagattgcaaatggaaaatagtaacacttcatcaggatatttatggatctgcagaacattctaatgaaccagaaatcgccaatttgcgttatagtctggtgcctgtgtttgaacaaaatgatattgatctggtgctggcaggacatgatcacgcatattccagaacaaaaatgttaaaaggcggtcagttcaaaatggaatattcggatgatgaatttgaagaacagttggaaaaagatatggatgcgggagaaaatcctgatacactttatgaggcaccgggaaatatttcagaagatacacaggatgagggcgaacaaaaatatctgaaatatctgcatgcggtgatggatgaggaagcagtaatggaattgacagagaatcaggaaacggcggtaaattctgatggaatcatgtatctgacagcaggatcttcatcaggaagtaaatattatgatctggtacctcgccaacagacttatattgccaacagatggcagcaggatgttccgacttattcggtagtagacattacggaaacaacattgacagtgaatacatatcgcacagatacacaggaaccgatcgatacacagtttatgcttgtgaaatcagttgatcatggacagctttccgcgttaattgaagaagctgggagtaaaaatccagaagaatatacaaccgagagttatcaaacaatgcagcaggctctggaaggcgccagaactgtaaatgcagatccggcagcagatacggcaacactgacaaatgcatatactgcattgaaaacagcattggatcagttggagatgaaacatcaggaaaatttaaacccaccgtcatccagtgattcaccggacaatggacagtcacaaaacggaggtacaagtggttctatgagcgaccagactacgcatacagaaggtatcaataaaaaaccagtgacttcacaaacaacggtaaaaacaggagacgctgtaccgattgcaggggcagtaatcgtgatgttaacagcgttactttgcggagtcggagtgctcgtggccaggagaaagcgtgaccaaaaatgaattggctgaaaaaagggagaaggcagtttatcattttcggaattacgattctgtttgctgcatttttgatacagttaaatcaagtggaacgggaagggctgtatgaaacagaaggaaaaacctttgaaaaagcaaaagtagtggagataaaaaaagataatacaacagagtcgggaaatcagattggaaatcaactggtttcccttcgattattaagtggcaagttccgtggaacagttgtggaggctgtcagttcttcaggttatctttacggaacacattgtgaaaagggcatgaaggtgatcgcggaagtgaatgaaggggaagattcgttgtatgttaccgtctacagttatgaccgtacggcaattttgtgtatgattgttttgctgtttttgctgaccttaagtctgatcggagggagaaaaggagtctattccgctgtcgctttgatttttacatttgtctgtattgtatttctatttttgccacttatctacagaggggtatctcctgtttgggcagcagtactggtcgcaattctgacgacggttgtgaccatgtatttactgggagggatttcaagtaaaagtgcgactgctgtggccggcacagtactgggggttggaatttcagggatactggcaattctgtttggaaaatggacacatatttccggatataatgttgcagatattgagcagttgacgtatgtaggtcagacaacgaatattaaaattggagaattgttgtatgcgggcattttgatttcggcactgggggctgttatggatgttgcgatgtcaatagcgtctactatcaatgaaatccactttcgcaatccactgctttctgcaagggaattatttttttcggggatacgggttggaaaagatatgatggggacaatgtcaaatacactgattttagcttttacaggtacgtcgattaatacgttagtatttttgtatgtgtataactattccacaacgcagatcatcaatatgtattccataggaatcgagttaattcagggaattgcttccacaatgggagtgatattgacgattccattggtttcattacttagtgcatggcatttaaaacggaaagaaattaaaattttttcaaaaatttttcaaagaacaggccggcggtaaaccaaagcggcgcataatcaagacggatgacccctttgatattgaattttgcacgactgtaatcccagggacagatccggtgtttctttaaaaacagaccggataaaaattccccggcaaaaataaaagcagtgtagatactaccccttaaaaaggtgctttttgttttcagtttttgggaaagcggagaaaagacgcacgccatcccgtagatcggaaacatccagatggatgtttttcccgcaagtgtataatcttttaccaaaagggaatgaagtcccgtaaacagtatttccatgcaccagccgatgatgccgcataaaataaattttttcttcataagaacaggatgtccgtttccgtgcagatttatgcagatgaaaatcaggtattgtacaatcggaaaaaaatgtattataatacagcttaagtttgaaatgacaaggagagaagaaaaatggcgacattggaagaactcagggagaagctggatgggatcgatgatcagatcgcaaagctgtacgaagaaagaatgaaagtctgcgaggatgttggaagatttaaagtcggcgcagggcgaaaagtgtttgaccgtcaaagagaacatgaaaaacttctggatgtggcatccaaggtgaacggtgagtttaacaagaaggggattcaggagctgtacgcacagctgatgagtatgagccggaaattgcagtatcagcagcttgtggaggcgggtgcactgggaagacttccgtttattgagatggagtcgcttgataagcagaatgtccgtgtcgtatttcagggggtggaaggagcttatagtcaggctgccatgaagaaatattttccggacaatgagaacaattttcatgtgatgactttccgggaagccatggaggcaatcgaggagggggcggcagattttgcagttcttccgattgaaaattcttctgctggagcagtcaatgaagtatatgacctgttggtagagttcgaaaattatattgtgggagagacgttccttccaatcgaaaatacgctggcaggccttcctggaaccacactctctcagattgagcgtgtgtactctaaggcagaagctctgatgcagacaagccgtttcttggaaaagcatggagactggcagcagatcagtgtgtccaatacagcggcagcggcaaaaaaagtcctaaaagagcaggatcactcgcaggcggcagtgtgcagtgcatatgcagcacaggtatacggactttctgttctggcagaggatatcaatgatgagactaataatgtgacacggtttatcattgttacgaatcagaagatttttacgccggctgcatcgaaaatcagtatttgttttgaacttccgcaccagagtggatcactgtatcagattttgtcgcattttatttacaatgacctgaacatgacaaagattgaatcccgtccggtggaagggaaaagctgggagtatcgtttctttgtggatttcgaaggaaatctcgaacagccgggtgtgaaaaatgcgatccgggggctcagagaagaagcgcggaacttgaagattttaggaaattattgatgagtatgagggaggaacaggaagatgcgtaccaatgaactgatcttatataaaaatatggaatacgaagagctacttttggatatgacatttctgatggaacattatgataatgaatactataatcaggaggatttaaaaggactgcttttttcctgtatgaatgaattgctggaactctcagagtgtcacggatttttcggaaatctctggcataccttcctgactttcctgctggcaaatgatgaaaatgcttacagtacctcctgcgagatcacgggagagacaaaaggaagcctgaatctggcggcagagcatgatttttggatttttaaagaattattcgattatgatttcactgcattgatgcgggttttggatgcaggctgtttttcccttcttctggactatgaaaatacacaggatgacaggattgtttttaataaacgaatccgtgacagaatctgtaatctgagcagggagctggagcaggcagaggacgtacagtcgtttaagcagtgcgtgacggagttttatcgggagtttggagtcggaaagctgggactgcacaaagcgtttcgcgtggaacataccaaagacggagcagcggaaatcgttccaatcacgaacattgctcatgtgcatctgaatgatctcgtaggatatgaggcagaaaagcagaagctgattgataataccaaagcgtttgtagagggaaaaagagccaataactgtctgctctacggagatgcagggacaggaaaatcatcttccatcaaagcaattttaaatcagtattatgatcaggggcttcgcatgatcgaagtatataagcatcagtttcaggatctgaacgaggtgattgcccagattaaaaatagaaactataaatttattatttacatggatgatctctcttttgaagaatttgaaatcgaatataagtatctgaaagccgtgatcgaaggaggtctggagaaaaaaccagacaatattctgatctatgcaacttccaacagaaggcatctggtgagggagactttccgtgacaaacaggatagggatgaagaactgcatacaaacgatacggtgcaggaaaaactgtcccttgttgcaagattcggtgtcaagatttattttgcctctccggctaaaaaggcattccagaagatcgtgacagaactggcaaagcggaaccatatttccatgccggaagaagaacttttattggaagtcaataaatgggaattgagtcacgggggaatgtcgggaagaactgcacagcagtttattgattaccttcttgggaaggaataaccgtatcaggcggaaaaagaaaaggaatttggtatgacaggaaagaaacggatgtgccgtcttgcattgacaggcgcactgctgttgctgtgcacaaatacggcggcaggatgcagacagcaggaaaagcaggaagtaacaccagaagtattgatggatgcggtagacaaaaatatgaaagaagtcaattcggcatccagttcactggaaatcgaggtggagttggaggatgtgctggatcatactagaatccgaatggatatggacatggagaacacggtaagccccagagcaggacacgcaaaggggagggcggaagtgaagctaaatgataatctggtctctagtaatatggaaatctaccaggtggaagaaggcgataagtatgtgacgtacagtagtctttatgagcagtggtcgaggacagagagtgaaaacagcgcctcttccggtggtacagaaacagattttttccagagtgcaagagcggaaatcgaagattttacgcttgcaaggcagccggtaaaggtccgggaaaagacgtgctatgaaatctacggggatatgcagggaaagaagctgatggattttcttggggaggagatgattcaggcctacggtcttgtcgatctgccggatcaggatgcgctggatacactggagattccggttacggtggatatttacaaaaaagaaaagctgccggcaaggatcattgtggatatgacagaaattatggatgaattgtaccaaagctatgggaagaccaccaatgtgaatttttataatatcgaattggtctatcaagggtatgatgatgtaaaaccgattcaggttcctgagagtgtgaaacaagtagtcaatgggtaggaatgctctaataatcgtataaatcatatacaaaggagaaaaagtatgtttttattccgcaagaaagaaatggatattgctgcagcaaagcaattttggaaatggtttgttgaaaatgagcaatggatcatagataacgtgagcagcaatggggtagaagttgtttgggcaattgatgcacagataaaacctgtttttccatattttaaaaaagaacttgaatttcaattgggattcaatcatggtattggcgaatttttcttcttccattttggaaacaaaaatctgatttctgatgctcaaaaattagatgagcttatgccggaatctctccgtgaaaagtggtctttcatcatagaaaaatagttggatgcccctggtaacaaattttgtaccaagggcattttgcatacatcttaatcagaaaattctttcaagtgactgatgtcactgtcgatgatcagcgaataattcgtgtagtatacgacaaatccgggttttgctccctttggctttttgacatgttttttctcaatatagtcgatctctaccttttctccgccgcgggctttggaataataagcggcaagttttccggcttcttcaaaggtacggtccggaagctcctctccgttggtgcggacaacaacatgagatccgggcgtgttttttgcgtggaaccaccagtcattgccgacggcaaattcgaaggtcagccagtcattctgcaaattgttttttccaacataaatatgatatccgtcactggaaagatagtgcagtggtttgtttttgatctttccctttttcttggtaaatttgcggcgcatatatccggattggatcagctcctctttgatctctgcaagatcctcctcactgagtgcaatatccacagcagtgctgacggattccaggtatgtgatgtcttcttttgtttcttcggtcaatttggataatgcttcaaaggtacgtttttgtttattgtatttctcaaaatagcgctgtgcattttccaacggagtttttgtggcatctaaagggatttttaccatttcattgttgtagtaattcaaagcttccagtacttttgcacctggttccaggttgtagccgtaagtatggatcagttcgccgtatactttgtatttgtcccgatcctcggtatcggataactgccgcatctgcagagcgtatttttttcgagcgcgttccagagcagtctgtacgatatggcgcagatcagcagatttctggcggatacgtgtgatctggtttttggttgcataataagtctccaacacgtgcgagatggaagaaaaagtttcccggtggtatgtgtgcaaatgctccagtgcaagagaagaaaactcctttggttcttttccgtcatagtaaacggacggggagaaatccccttccctgactgcggagagataaatacaaaactgattgtaaaagtgtacacagacatctgcggaaagctctgaggccggaagccttgaatctataccggaaagaaaacagatctcctcagcggtgacgggactgatcccggtaaagctggtgtaaattgccttggataccggcattggttttgcacgaagcagggtatgaaactctgcctctgaaattgtgagcggatctgctttttccatggtgtctgggatgaaatagtcccgtccgggcagcacttcccggacagaactcatctgggcggagacatgtttgatgctgtcaatgatcgttccgtctgaagtacagaaaataatattgctgtgtttgcccatgatctccacgatcagatccttgcggcaaagatcgccaagctcatccagatgctcgattgtaaaatgaatgatccgttctagtttgggctgccagatatccacgatccttccgtttgcaatgtgttttctcaaaagcatacagaaattgggagcagtcatgggacttggtttattcatgtcagtgagatatatgagcggaagagatgcgcttgcagaaatggaaagtcgtctctgtcccttaggggatttgatcgtcagcagaagctcgtctgcctccggctgtgcgatctttgcaattcttccgtttaaaagctgttcttttaattcgtggaccagattggccacgacaattccgtcaaaagccataaaaaaatcctttcttttggttggtttcgtttaacttgattattgtatcacagaattcggacaagtggtacctgaaatcgggaatttctggagtgaaagcttgaccaaacagcataaataagagtatactggtaacagaatttcaagaaaatgacagaggacaaagacatgataaaaagtatgacaggttttggacgatgtgaaattcaaaaagagtccagaaaatttacggtagagttaaaaagtgtgaaccacagatatctggatgtaaatatccggatgccaaaaaagctgaatttttttgagacggcgatccgtacgcttttaaagcagtatgccaaccgtgggaaggtagacatttttatttcctgtgaggatttgtcacagcagcagatgatgctgaagtataatgctgcactggcagcggaatatatgcgttatttccgtcagatgagcgaggagtttcacattgcaaatgatgtgaaagtatctgcattgtcccactatccggaggtacttacaatggaagagcagacagaggatgaagagattctctggagcgggctcaaagaggcgctggagggagcgtttggacagtttgtggaaaccagagttttggaaggttctcacctaaaagaagatatccttcagaagctctctggtatggaatcacttgtggaacaggtggaagcacgttctcctcagattgtggcagagtatcgtgcaaagctggaagaaaaagtaaaagaattacttgcggacgcgcaggttgaagagagccggatcgcagcggaagtgattctgttcgcggacaagatctgtacggatgaagaagttgttcgtttgaaaagtcatatcgcacatatgagaaatacactggaagagtcggagggaatcgggcgtaagctggatttcatcgcacaggagatgaaccgggaggcgaatacgattttatccaaggcgaatgatctggaagtttcgaattatgccatcggactaaagacagagattgaaaagatcagagaacagatacaaaatattgaataaccaggagataaaggagaaattttaaagagatgaatcagagagggattttgatcgttgtatccggattttcaggggcaggaaaaggaacactgatgaaagaattgatgaagcgttatgaggaaacttatgcactttctgtttctgccaccacacgaaatccaagagaaggagaagtggacggaagggaatattttttcaaaacaaccgaagaatttgaaaaaatgattgcgaaagaagagctgatagagtatgctagatacgtggaaaattattatggaacaccgcgtacctatgtagaacagcagttggaagcgggaaaagatgtgattctggagattgagattcagggagcgctcaaggtaaaggaacgctttccggacacattgcttttgtttgtgacgccgccgtctgccaaagagctgcgcagacgtctggtcggaagagggacagagaccatggaggtgatcgagtccagactggcaagggcagtggaggagtcagagtacatggatcagtatgattatctggtgattaatgatgatctggatgtctgtgtatccgagatgcataagatcatccagggagagcatcaaagaagtttccgtaatgagagctttattcagagtatgaaacaggatttaaaagggaatgtgaaaggagacagatagaatatgttacatccatcttatacagatttgatgaaggtcgtaaatcaggacgttgaggaaggggaatcaaaggttgtaaacagccggtattccattgttatggcaacgtccaaaagagcgagacagttgattgacggagatcttccgatggtacatgcaaaggcaggagagaaacctctgtcaattgcaattgaagagatgaatgcaggcgaactcaagattctggcagaaaacgcagaagaggaataggcatagaaagagaagataaggggcagatgccatatggtatctgcctttctgactgttgaaaaaaggagaaaaatgaaatatgaatatactttttatttccctcgggtgtgataaaaatctggtggacacagaagtgatgctggggatgctggcatccagaggatatcagatggtagaggaagagacacaggcagatgtgatcgtgatcaatacctgctgttttgtccacgatgccaaagaggagagtattcagaacattctggagatggcagaatataaaaaagagggcagattaaaagccctgattgttacaggatgtctggcacagcgctatcgtcaggagattttagatgagatcccggaagtggatgcagtgcttggaacgactgcatacgacaagattttagatgcgattgacgaggcactaaaggggcaccatacactgacattggccgatacagatctccttccagaagtggagacaaaacgtctggtgactacgggcggtcattttgcgtatctgaaaatcgcagaagggtgcgacaagcattgtacgtattgtattattccaaagatccgtggaaatttccggagtgtgccgatggagcagctcctgtcagaagcagaatatctggcagaacaaggggtaaaggaactgattctggttgcacaggagacaaccttgtacggaaaagatctttatggtgaaaaatctttgcacaaactcttgagagagctgtgtaaaatttcaggaatccgctggattcgaattttatattgttatccggaagaaatttatgatgaactgattcagacgattaaggaagaaccaaaaatctgtcattatctggatcttccaatccagcatgccaatgatgagattctcaaacgtatgggaagaagaacgacaaaacaggaactgatagatattatcagtaagctcaggagagaaattccggatatcgcgcttcgcaccacattgatcacgggattcccgggagaaacgaaagagcagcatgaggaactgatggagtttgtggatgagatggaatttgacagactcggtgtgtttacttattctccggaggaggatactgcagctgcgaggatggaagggcagatcgaggaagaaatcaaggaagaacgccaggctgaactgatggaactgcagcaggaaattgcgtttgatactgcggaaaatatggtcggaaaagaagtgcttgtgatgatcgaaggaaaagtagcagatgaaaatgcatatgtgggaagaacatacagagatgcgccgaatgtggacggtttgatttttgttaacacagaggaagaactgatgtccggtgattttgcaaaggtaaaagtatcgggagcagtggattatgatttgataggaggtcttatctgatgaatttaccgaataaactgacggttctgcgagtgctgatggtaccgttttttgtgctgtttatgctgacagatcttggtggagcggcgaacaaatggattgcactggcgatttttgtggtggccagtctgaccgatctgctagatggaaaaattgccagaaaatataatctggtcacaaattttggaaagtttatggatccgcttgcggataaactgctggtatgttcagcaatgatctgtctgatcgaaaaaggaagtctggcggcatggatcgtgatcgtgatcattgccagagagtttattatcagtggattccgtctggtggcgtctgacaatggaattgtgatcgcggcaagctactggggtaaattcaagacagtctttcagatggcgatggtcattgtactgatcatggatctgggtggtgcttttgatgtgatcgggcaggcactgatctggatttcactggcacttacgatcatttcactgattgattatgtggcaaaaaatattcaggtactgaccaacggaggcatgtaagatgtatacagactggcttttaaaaatgaaggaaaatgaagcgcagacgacattggaagagcgtgtggtggaattgcttgctgaacacaaaatgacagtcactacagcggaatcctgcacaggcggcctgatcgcagcaacactggtgaatgttccaggggcatctgacgtattgaatgaagggtatatcacatattccaatgaagcgaagatacgtcttgtaaacgtttccccagagacattagagcgttatggagcagtcagttcccagacagcaaaagaaatggcgaatggagcagcaaaggcggcaaaagcagaggctgctctaagcgctacgggaattgcgggaccgggaggaggaacagaggaaaagccggtaggtctggtttatatcggctgttctgtgaacggaaagacaactgcaaaaagatgtgtttttgatggaaaccgtatggaaaacaggcagcatacagtggaaactgcattggaaatgcttgtggaagcactggaaaatctggaaaaatagaaagtgataattgacgaatgtcggaatttgtgagagaatgtaaacgaatacggcgttaagaatttatcaaagccgcagagggaaacctcaaataatacacaattacatatgttgaaaggagttttaacatgatttattcacacgaagtagaaatgatgtgtccggtagctcagggagcaaatcacggaccagctccaatcccagaagaagcaaaatgggtgcaggcaaaagaagttaaagatatctcaggactgacacacggtgtaggctggtgtgctccacagcagggaacatgtaagctgacactgaacgtaaaagaaggtatcatccaggaagcactggttgagacaatcggatgttcaggaatgactcattctgcagctatggcatctgaaattcttccgggaaaaacaattctcgaagctctgaacacagaccttgtctgtgatgcaatcaacacagctatgagagaattattcctgcagattgtatacggacgtacacagagtgcattctctgaagatggacttccgattggtgcaggactggaggatcttggaaaaggacttcgttctcaggttggtacaatgtacggaactcttgcaaaaggacctcgttacctggaaatggctgaaggttatgtaacaggtatcgctctggatgagaataatgaaattatcggatacaaattcgtaagccttggtaaattcacagacttcattaaaaaaggtgatacaccaaacgaagcatgggaaaaagcacagggacagtatggacgcgtggatgatgcagttaagatcatcgacccaagacaggaataggcgataggaggacttaaaatggctttatttgaatcatatgaaagacgaattgataaaatcaatgctgtattaaacagctacggaattgcttctatcgaagaagctgaaaaaatcacaaaagatgctggactggatgtttacaatcaggtaaaaggaatccagccgatctgttttgaaaatgcatgctgggcttacattgtaggtgctgctatcgcaatcaaaaaagactgcagaagagctgctgacgctgctgctgcaatcggagaaggtcttcaggcattctgtatccctggatctgttgcagaccagagaaaagtaggtcttggacatggtaacttaggaaaaatgcttctggaagaagagacagactgtttcgcattcctcgcaggacatgagtctttcgcagccgcagaaggtgcaatcggtattgctgaaaaagcgaacaaggttcgtaaaaaaccacttcgtgttatcttaaatggtcttggaaaagatgcagcaaagatcatttccagaatcaacggatttacatatgttcagacagagtatgactactacacaggagaattaaaagaggtttcccgtacagcatattctgacggacttcgttctaaagtaaactgctacggagcaaatgatgttcgtgaaggtgttgcaatcatgtggaaagagggagtagacgtatctatcacaggtaactctacaaacccgacacgtttccagcatccagttgcaggaacatacaaaaaagaatgcatcgaagcaggaaagaaatacttctcagttgcttcaggtggtggtacaggacgtacacttcacccagacaacatggcagcaggaccggcttcttacggtatgacagatacattaggacgtatgcactctgatgctcagtttgcaggatcttcttctgtaccggctcacgtagagatgatgggactgatcggcgctggtaacaatccgatggttggaatgactgttgctgttgcagtagcgattgaggaatcagcaaaagaaggaaaattctaagaaacggcggaaaatcgcgggttttgaagagtataaggacgtgtaagagtgtatagataagtggtacattagtacattattagtacactattagtacaagtaaaataataaaaaacagagacattttttaatgtctctgttttttataagatcctatgaatatttattatgagaaaatcgaatcttgcaaaatagttctttgcagtgttatactaaaaccagagattcatagacgggatggaaatggagtattaatgtgaagagtacaaaagcagatgttatatttaaagatttctggcgtgtaaacgaacattttgcagatttgtttaatacagtagtgtttcatggaaaagaaatcttaaaaccggagatactggaagagatggatacggatgtttccggtgtgatcgagatgaaagattataaggaaacattatcaagaacaagagacgtgatcaagaagactgcttatggggtagaatttgttgtgttagggattgagaatcaacagcatatccattatgcaatgccgctgagacacatgatatatgatgccatgggctacttgaaagaatatcaggagattacacgcaattataaagggtcaaatataaaattgtcagattccgatgaatttttatcgagaatgcgaaaagaagacaggatgcatccgattattacactaaccatttatactggtgaaaaagtatgggatggaccgtgttcgttgaaagatatgatcgtggaaatgccagaagagattgcagccgttttttcagattataaaatgaatctcctggaggtaagagattcggcaggatatgtctttcggaatgaagatgtgcagagcgcatttgagatcacacgagaagtgttcgcgggaaattttgatgggatccgggaaaaatacagtgataagagaattagttcagaagctctgtctttgattggtcagatggcaggttccacagaactgattgagatgggaaaatcgatggaggtgacgaatatgtgtaccgcattggaacgtttgaaagcagaaggtgttgaacagggtatcgaacagggtatcgagcagggcatggaaaaaggggtagaaaaaacagtcatttctatgctgaagaaaaattatccgatttctgaaatttgtgagattacagggaaaacagaagaagagattttgaaaataaaagagacactgtagtgtatgggagatatcaaaaggtatctcctatttttattgtgccgaaattcggcataatatgagttttatgaaatgttatagaggtgaagatgtgtagtatatatgataatttaagaaaaggtttaggaaatgtatcaaaagatagatgtatatttatatttcttacattgcttagtatttttgcagggagctattgctgtaatatatcggcattgccaggatttgaatggtttattcatcatagtgaatttctaaaaaatatttcctatagcgttgtggcagggtacattttttatctggtacagtatgtaatatccaattatattcttggtaaaaaggcattaaaattactaatacctgtgcggggatggtttgctgcaaaaaagggaggatctatagacttgaaggggcaagatgtcctcctttatgaaactgccataaaggggacattggaacaggaaaaattgtattacagaaaaaaagcggcaccgttcaatcgtaaccgcaaaatagaaagtatcttttcaaaatcatcatatatgagataataggctcatcattataaaggtaaaaaggtttagtactcaacttttttgactagagtgtgtttgaaaaataaaatttgcacaaaacatgtgtttttattccctttttcatgataaaataaagaaaaaaaggggggatccaaccgaaattggacacagtcgagaaggagcaagcactaaagcttatgttattataaatcaaaaagtgaagggaaaactaaaatggggaaactatattttcgatacggagctatgggcagcagcaagacggcaaatttgctgatggttcactacaattttctggagagggggagacgtccggttattttgaagccaaaactggatacaagagacggagaatatattgtgaagtcacgcattggcttacaggcgaagtgcgaattgattgaagagtttacgatgaagccggacacgtatgatgcaatcctggtggatgaagcaaatttcctatcatctgaacaggtggaatggctggccgagatctgtgatcagtatgatattccggtcttatgctatgggctgaagacagatttcagaggtgtcttatttgaaggatcaaaacggctgatggagctggctgatgcgatcgaggagcttccgatcatttgctggtgcggaaagaaagcacatttcaatgccagagttattgatggaaaaatggtaagggacggagcgcagatcgcgcttggagccaatgatatgtatgtaccgctctgtaggagacattttatgagtggagagattaaaccatatcagacggtagaggagaaatgagtatgattattcagagacattatgaaaatttgaatataatgtatgaaaatacaatgccatatcggtcctattatattccggcctcttgcaacatgggaccgttggtggagaacagagaaaaatcagatcggatgactttgcttaatggaaaatggaaattttgttattttgacagtatttacgatctgcaggatgcgttttacgaggaaggatattcacttgacgggtttgaagaagtgactgtccccggaatgtggcagaattatgggtatgatacgtatcagtataccaacgtgagatatccgattccgttggatcctccgtatgttccacaggaaaatccgtgcggggcatatgtgcggacatttgagtatcagaagaaggaagatgcaccaaatgtatatttaaatttcgaaggggtggattcctgtctttatgtctgggtgaatggaacatatgtaggatacagtcaggtgtcccatgcttccagagagtttgacattacagatctggtgaaaaacggaagcaatacgctggcagtactggtcttaaaatggtgtgatggcacctacctggaagaccaggataaatttcggatgagtgggatttttcgggatgtgtatctgctgcagcggcctgataatgccatatatgactatttcacaacaaccaggattgtggatggaaacgcagaaattactgtgcgggcaaagtacttaaaagaagcagcgcctgtgaagattgcaatttatgacaaagaaggagtgttgtgcgtatccgggagactgcaggaaatatcggatggggaatatacacatcaggcggtattgaaaatagaagcccctaaattatggaatccggagcaaccatacttgtatacaatggtcctggaaaacacaggagaagtgattgttgaccgaattggaatacgggaaatctctatcagagatgcagtagtttatgcaaatgaggtttcggtcaaattcaaaggggtaaatcgtcatgattccgatccggtaaccggatttgtaatcggaatggaacagatgaaaaaagatctgcagatgatgaaagagcataatttcaatgcgattcgaaccagccattatccgaacgcgccttatttttatcagttgtgtgatgaatatggattttacgtgatcgcagaagcagacaatgaaagtcatggaacacagtcacaatatctggaagattccagttgggaaaatatcagcaaacgatggaatgaacggattgcggatcatcctgcgtttattccggcgacgatggaccgcaccaggctttgcgtgtacagagagaaaaatcgtccctgtgttgtaatctggtccatgggcaatgaatgtggatacggatgtacatttgaagaagcgttgaagtggacaaaggaatttgatccgtcccggctgacttgttatgaaagtgctctttataaaagtgacaggagaagatatgattactccaatattgatctttacagcagaatgtatcctgagttggaagagattgaggaatatatggagaaaggaccggataagccgtttcttttgatcgaatactgtcatgcgatggggaatggtcccggggatttggaagactattttcagatgatttacaagtatccgtctctttgcggtggatttgtatgggaatggtgtgatcatgcaatctataaagggcaggcggaaaacggaaaagcaatgtatttttatggcggcgatcataaggaagaagttcatgacggaaatttctgcatggacggtctggtatatccggatcgaacgccgcacacagggcttttagaatatcaaaatgtgtaccgtccggcgagagttgtttcttttgagcaggaaagcggctgtttggtgttgaaaaattatatgaacgaagaggatttgaaatcctatatttacatcagttacgaagtcagctgtgatggggatgtttttggaagggggcaggttgaaattatgcaatccatcttaccacgtcagtgcaaagaggtgtatgtggatgtttctgtcccggagactggaaagtgttatttgaagatcttttatcatcaacgccaggatacggagctgatctcgcatggaacgatcctggggtttgatgagattcttctgaaaaatgaggatggaagaaatcagaaagctgtgacactgcttaagacgttcaaaacatccaaaggaaaaatgaagctgtcagaaacggatagatatatacagattaagtcagatgattttacatatgtttacaataaactggccggaatgtttgaagaactgaacgtaggcggaaagaagattctggatgctcctatggagctgaatatatggagagctcctacagataatgacagaatattaaaacgaaaatggattgcagccgggtatgacagaagtctgggaagagcgtacaatacacagtggaaacgagaaaaatcaaaactggttcttcacagtattctgtctgttgcggcagtttcactgcagaaagtgttggatgtagatgcagtgtgggaggtttttgatacgggtgaaatctgtgtaacaatgcgtgtaaaaaaggaaatggagtttccggagctcccaagattcggaatccggctttttttgaagcaggaatttaatcaggtggaatattatggaatggggccccaggagagttatgtggataaatgcagggcaagcagtcatgggatttatcgatcatcagtagatgagatgcacgaagattacatcagaccacaggaaaatgggagccatgcagattgtgactatgtgaagctgacaagcaaagaacagagcgtaacagtcgtttctccgcattcgttttctttttcagtatcaccatatacacaggaagaactgacaagaaaagcacatcattttgaactggaaaagagcggaagcacgattgtttgcctggattacgcccagaatggaatcggatcaaacagctgtggaccgaaacttagaaaacagtattgctttcagaaagagcagtttgtatgcgagtggaagctgatgtttgaggaaaagagcgagaaattatccagaaatgattgtttctgtaaggaagacagggtataatggacacagaaatgaccgaaggataaggaggcagtaacgtgtcagaagaaacgaaagatatagaagaaaccaaagtagcggaagaaaaaaagatggaaacagagcagaccatactttctcagccgacagagaaaaaggctgcagagacagtgacacagattcaacaatcggtggagatacaggagcagaaagaaaaaactgagccggaaccgaagagaagttttatccgatcaaggaaaaaagcggcagcgtccagagaagaacagattctttccaggattaaagatgaggacttgatgaagtatctggagatggagcatgaaagactggagatgatgcagagcatcaaagaggcaagggaaaagagagtttttacaatgcttcagcttttaatttctctggcagctattgtgatcgttgtatttttgctgagagataatccgacagttcttgtaaatattttgtatatcgtggggattatcattgtactctggatcctgaaaggaccacatgagaagaatccatttaaaaaggaataggaaaatattctgtacgaaaaagaaaagataggatataataggaaagagatgcggtgaatgctgcatctctttttggcgaaacatcacaatttgacagaggaagagaatgatgagtacagaactggaaaaatattataataaattttgcgaagagaagaggctgaccagaaggcacgggtatgtggagtatgtgacatctatgaagtacatccatgagtatctgcctcaggggaagaaggaaacggtcaaaattctggatgtgggagccggtacagggcgttattcggtacagcttgccggggaaggctatgatgtgacggcagtggaactggtaaaatacaatctggggattttaaaatccaaaaagagcagtgtaaaagcttatcagggaaatgccttaaatctgtcccggtttgaagcggatcagtttgacatggtactggtatttggtccgatgtatcatctgtatacaaaggaagataaagtaaaagcgttaaaagaggcaaaacgtgtggtaaagccgggtgggatcattttagtggcatattgtatgaatgagtacagtattttgacgtatggattcaaagaaggacatatgaaagagagcatccggaatcaaaaagtggatgatagttttcatgtgcgatcgaaagaggaggatttgtacgattatgttcgaatcgaggatattgacgccattgaccaggcggctggcgtaaagcgggaaaaactgatcgcagcggacgggccggcgaactatatgcgaaccgttttaaacgccatggatgaggagacgtatcagttgtttatccagtatcatttgtccacctgtgagcggaaagatctgctgggggcaagtgcgcatacactggatattgtcagaaagtaacaagatcataaaaagcaggagaaagtatgagtcagacagaagaattgagcagaagagaagagcagtttttagaaaacgtgctggagaatttaaggcagaggatcgggaagatcgctcaggaactggaagaaggacaaaaagatattgagagtatgcatgaatattactgggaaaattacacagagatggaccagtacggctatgaagactatgataatcagcaggctctgctgcaccggatcaatgcgaatcaggaaaagctggatttaaaacaccgctttcagaagatgttagattctccgtttttcgggagagtggattttatctatgagggagaggaggaagcggagccattttatataggaatcggaaattttgcacagaggacaggggctacacctctgatctatgactggagagcgcctgtgagcagtctgttttatgattatgacagcggtccggcatcttacgaggcaccggcgggtgtcctgacgggagaaatcgcgtccaaatggcagtataagatcaaaaacgggaaaatgatctatgcatttgagagtgatacgaaaatcgatgatgagatcctgaagcaggagttaggaagcagcggtgacgtacagctgaaaaatattgtgcgtacgattcaaaaggaacaaaatgagattatccggaataccggagataaaatactggtcattcagggagcggcaggaagcggaaaaacatccgttgccctgcatcggatcgcatatcttttataccatgacagggagcatttaaaatcctcgaacattctgatcctgtcgccgaacagcgtgttttccgattacatttcccacattcttccagagcttggggaagaaaatattcgggagatgagttttgatctgtttgcgtataaggaattgaaagacgtggtttcagattgtgaagaccggtatcatcacatggaacggcagatgaaatttccggataaaaagaggcagaagcgcttccgcgacaagcagtcctttgcaatgacagggcagatggaaagctttctggcggttttggaagatcggctattggatcttacttctgtggagtttaaaggaatgcagcttagggaagaagaactgatcgagctgtgttatttcaaatttcaggagatccctcttttggccaggatggatgcagtgaaagagtattttaaagaccagtatgaaactctccataacagagacctttcagaggaagaagaggaaatcctgcagagaaaattcgatcgtatgtatgtaacaaaggatctctatgtgatttataactggcttatggaagaatgcgggtatgagaaacttccggatgttccttatgagcggcggattctggaatatgaagatgtatttccgatgttgtatctgaaatatcgtctgaaagggaaaaatgaacaccgcaacatcaaacatctggtgattgatgagatgcaggactattcctatctccagtacgtgatcctgcacacactgttttcgtgccggatgacgattttgggagataaggcacagacactggacgagacgatgcaggatgtcctgttgtttcttccaaagattttcggaaaaaagatgcgcacgatcgtgctgaataagagctaccgaaatacagtggaaatcgcgacgtatgcaggagcaatcaaccagacaacggatttggaattgctggacaggcatggaaaagcagtggaagaagtgcatttttcggaggaagagagtatgctcaaagccattggagaaaatctgagtgtgggagagaacggctatgagacagcggcagtgatcgcaatgacagaagaaaaagccagagaactctatgaacttttgaaacgaagaggaattcaggcgtcttatattgacagagatacctctgtttttgaacgcgggcttacagttacaacattttatctggcgaaaggactggaatttgatcaggttttcggcgtgtttgaagaggaagaaaatcctttgatgacacaggcgaaatacatctgcgcaacaagagcacttcatgaattgtatatgtatacagtgagtttataaaaatttaagaaattagacgtgattgacaagagtaaagacggatgatataatgcctccccggtaagtttacaacaagggaggcagaagatatgactctatatcaggagttacaactgaatcaggcaggctccaagcagctgattcgaaacacacaggataaaaaagaaaaagcacgtcatattgcggtttatctatttaaaattttactgacactggctttttgtgttgcatttgtcacagtatacacaaaggtattcggcagtgataacagcattgtaggagtggtagtgctgttgagcgtgatgacatttcggtttgcagattttgggattcatgcaccccatgcacttagttctctgatggtgatctggggaattatgacatttggtccacggattgcaaatgcaggaaatctggtgacggagctgatcgtcaatatggtatgtattttcacgctgatgattctgggatgtcataatgtagtgatgttcaatcagtctacgttgctgctcggatatctgcttttgtatgggtatgatgtttcaggcacacagtatctgcagaggattgcagggatggcggtcggcggcatcctgacagggatcgtgttttaccgcaatcacagacatcagaagtacaaacggacgctgcgtcatatttttgaggaatttgaccttcattcctccagaaccagatggcagatttgcgtgaccctgggggtatccagcgtaatcttttttgccggactgtttggattgccgagagcgatgtgggcaggaattgcggcgatgtcggtactggtaccgtttcatgcagatatgaaaggaaggatcaagggaagaattccgggaaatatcttaggaggtctgacatttattgtgttatatctggtacttccggaatctatgtattctctgattggcattttaggcgggatcggagtcggtctctcagctacttatggatggcaggcagtatttaattcctggggtgcaatgtccattgccatgacatttctgggagtgggcggcgctattttttaccgtatctttaataatgcatttggagctttctatgcactggttttttatcggctgttttctatcggtatggactggattacagaagtaaagaaaaagcgtgtttccgtttaaaatggaaacgcgctttttctttcatattaataagctttgagatcctgacggtaaaagcagatccctacgatcatagtaagaaattcagcggcgggaaatgccagccagattccggtacttccaaagaataccggaagaatataaacaaatgccaccaccagaatgcatcctcttaacaggcagagtgaaagagactgaacggattttgctacggactgaaaataacagataaagaccatgttgatgcccagaaacaaaaatccggtaaaataaatccggatggccggtgctgccagagtcaggattttgctcgttggttccagaaaaatataagtaaacagattcggaacaaataatcccagaaggactggcagggtacagatgatcacagatgtttttaatgaaagtgactgtacctttaagatccggcttgaaagccctgctccgtggttgatcgacaggatcggctgagcagcctgttcgattcctttacagaggcagatgactaccagagcagtattacagatgatgccatatacactgactccggtatttccaagatagcggatcagctgcaggttaaaaataaagatcgtaaatccggatgcagcttcgatgacaaagctggtgaaaccgtttgcaatgatcttctgtaaaaaggaaggatgaaatcctttcaatgtaaattttagctggttctttttcgtaaaaaagtgcgtgcataaaataaccacggtaaggcttgaaccaagaacagtggcaagtgcagcccctttcattcccatattcataggatacaaaaagatatagtccagtacaatgttggtcactccgccggcaatgactccgttcatggcaagttttggtgcaccgtcattgcggatgaaagtctgaagaaaagaagaaaagaaataagttcccattccccagataatataaggaagatagtccatgatgtaaggcatggtttcttctgtgccgccaagcagccatgcgatgtcttccataaacagaacgcagactgtcatggagatgagaagaagtgcaaaattcagcagcagggcagttgtgaaataggtatttccttcttctttttgtgattttccacggcagatggacatcagtacagagccgccgacaccggataaaagtcccagtccgaaaaagatattgtagatcggcagggagatatttaaggcggcaagtgctgtggcaccaagccgcttcccgatgaagattgtatctgcaagcacatagatggatgtgaccatcgttccgcagatagccggtatcagataatgaaagaataactgacggaccggtttttgaataaattcattcgtattcatagcataactccattcctaaaaaatcctccgcatgatagtgtaccatagaatgacttttaagaaaagctatttcaaaagaaatcaatctcgtgtataatgaacagtaacctgaacaggtgattggtgaataaaaaggagaaaaaagatgataggaattatcggagcaatggaagaagaggtacaggcattgagacatgccatgaagattcaggaggagaaggaaatcgcctccatggtatttcatagaggaattttatatggaaaagaagcagttgtcgtgcgaagcggaatcggaaaggtcaatgcagcgatttgcacgcagattttagcggatcattttgatgtagatcttgtgatcaataccgggattgccggttctctggatgcagcgatcgatattggagatatggtgatctctacggatgcggtgcagcatgatatggatacgagtattttcggggatccgatcggacaggttccgcgtatggatacatttgcattccccgcagatgcccagttggtcgaaaaggctgtgcgtgcgaaccaggaggccaatccggatatccatacatttaccggacggatcgccagtggagaccagtttatttcctcacaggaagtaaaagaacgaatcgtaacacttttcggagcaaaatgtgcggagatggaaggtgcagcgattgcacatggggcatatctgaatcagattccatgcgtgatcgtgcgtgcaatttccgataaagcagacaacagtgcatctatggattatccggcatttgagaagaaagcaatcgaacattccatcaggttgttagagaaacttttgcctgagttatagagaaaaagacctgggagatcaggtctttttctctataataacatttttttggttactgttcccatagtaacactctttcagacacaaattctgtacttcagacaaaagttcttgtagaaggagaaaggctgttttatactaaaactacgccagaaaaatgatgggcaaaggaatgaaaagaaaatgaaaaaaattgcgatatgtgatgatgagccggcagtgagaaaacagatggaggcatatttcaaagagctggaatcggttttttgcatctcttattttgaaagcggagagacactcctggaatcggatgttctttatgatgtgatctttctggacattgacatgaaaggaatttcggggattgatactgccagaaaaatcagagttcgggataaaaaggcaaagatcatttatgtgacagcttatgaagattttcgggagtatgcgtttggtgtccatgcgttcggatatctggtcaaaccagtggaaaaagaaaaaattctggaaatccttcaggaagcttttgactatgaacaggaggagcaaagaggtcccaggatccgtcttcatacagacgcagggtatcaggaattttatatgcaggacatttgctattttgaatatagagaccgaaaaatccggattgtgacgcagaatggagaagcatggatgagaggaagtatcagtaaaatggcagagtctttccaaaacatgggatttgcagttcctcataaaagctttgtagtaaatctgcgtcatatcaaagatataaagggctgtgatctgctcatgacgacaggagagatcgttcccctttctcaaaagaaagcggcagattttcgggcattgctgacgcgatggctggcgcagcaggtatgaaaggagaaggcgtatggcacttgagattgggatgaatctggtctgttctgttttggaacaggtggtcatgtgtgtctgtcagtatctgtttatgagcgccaatgcacagacgatccaccggaaaaaaatctggtatttttttggatttactgcgcttggcgcaagtgtttacggtgcggcatttctgacagggctgaccgggaatctgtggatcggtgtacagatccagctgacaggggtgctgcttcttggaattttattgtttcacagaaaaatcggaagtctgcttctggatctttttgtaaacatacttttgattctttccatagaagttggtatttttctggggaattacctgcttgcacagggggcgtttgagaatcttgtgtggtacgggaatgttaccatgctcttcaaaatgtttttcatgattcctgtgacagcggctgctgttatgtggagaaagagacagcaggaaacagaaatgggaaacttgcagatactgctccttttattacttccgctttttagcgtactgtttctctattcactgatagaaatgggacgtatctatatggatctgtatggagttcgtctgatggtcgtcaatctggcagcgctggtgcttttgaatttttgttttttgtacctgtttggatattggttccgttcccataagctggaggggcagcttgcagagtttcagatgcagaatgagctgcagtacagatattatgcggaattggagcaaaaacacagagagtccagaaagatcatgcatgatatgaagaatcaccttcaggctgtagaacatttatatcaggcaaaagatgggcaggagcagggcggagcgtatgtgaaggatctgtatcatatgttgaatctgttgggtgagaaatattacagttctaatcggatgctgaatattatctgtaatgataagctctcattggcgcggcatcctgcagtcgcgatatccgtggaaatcggagatgttgatttttcggatctgcgggatattgatattacgacgattttcgccaatttgctggataatgcattggaagcggcggaggattttggagagggagcctatctgaatctgaaaatccaggaggtgcatcatttcagggtgatcagtattgtaaatgcaagcagacccggaatgaaaaaggaaggacatatgggggtgggattggaaaatgtgagacggacagtagaagcgtatcagggaacaatgcagtgtgaaattgtgggagaagaatatcgggtcagcgtgatgctgccgggaaaggaggactcatgaatttgctgtttgaagggatcagtttattgatctgtatcgggataccggttttgggaggaatttattttgcggtgaatggaaagggatattttcttacgtttcttacaggaatcctgtcttttgtggtgacgcagatgattctgcggattccacttcttggttatctgaagacaaattgggagtggtttatgatactgccatacagtcattattttatatatatggcgattacggcattctcagcaggtgtgtttgaggagacaggaagagttgtgggacttggcgttttgaggaaaggaaaaaccagctggatggatgcagtggcatttggacttgggcacggcgggatcgaagcggtgtggatcggtgtgattggagtcttgccgaatgttctgaatgaagataccagtataagtgtggcagtgttgctttccggagcagagcgtttttgtgcgatggcctttcacattttgttgacactggtcatcatggaaggaatccggagacacaaaaaattgttttattggctgatcgcagtagttctgcatggattatacaacttttcaattgcatttcagaatacaatcctgatttggggtgttctgattttgggggtcgtggctgcgatgatagctttgatttttacaaaacgaaagtggaaagaagaaaggggaacaagacaatgaaaaagaatatgaaaaaactggcagtgggattcggcgttttcgtgatggcagtaggaagtctgatgggatgtagctctctgggaagcggaggaaatgaacaaggagagatcctgaaagaactgccggaagggtttgacaaggagacggtaagagagcaggcaatggaagatattgagatcgcgcagtctaaagattatgagagctggaaaagcaggtttgccaaggatctgcagagcagtctgacagaagaatcgtacgattcctatttgaaaatcctggagaaacagggagaattcaaagagtttggaaaatgtacgtatttagggcagataaaagataataaaaagtacggcggagtcattattgtggtaaaatatgaagaaggcaatgtcaattacagtcttgcgtatgacgaggatatgaatctggtcagctttacgatgtaagagaattgcccaaaagggaaaggaggcgacagtatggtacatcatattgtaatgtggaagttcaaaccggaaatcgaagaggagagaaaagcagacctcaaaaaagatatggaagcgaatctgagcagtctgattggaaaggtaccgggacttttaagtgtatcgtttgtaagtgaaccatttgcatcaagtactcatgatatggcgcttgtgacaacgtttgaaaaagcggaagatatcaaagcgtattctgcacatccggagcatgtcaaagtagcggatacatatgtgcgtccgtttgtgacagagcgtgcatgtctggattatcaggactagaagaaaagtatcggagcggacagtgctccgatacttttttaaaagggatattccagtaattctggaaaacgcgtgattttgtgagcataatgagtgggagaaccgaatccgtattctgcaaaaataaacggaattccggcaaaggtgcaggcatcggcatcccccttcgtatcccccacataaacagcatctgtgatctgagcgcgttccatcagaagacgaatgttttcgcctttggaaagtccggtatttccgaaacattcgaagtcggtgatggcgttctccagtccggtctttttcagaaagagttcaatatatcctttctgacagttggagacaatgcagacagcataattctgcgacagtgttaagatggtctctttcacgccgtcgaacagaagatgctctctggcattttccagataaaattcttcgtattcacagcaggactccatcacaagaacgcgctgagattctgacagagtcggaaagaggtttgcggcgatctcatccatcggctttccgaattcctgtttcagacggtccgcggtaatgggagtatccagagggatcatcagctcactggcagcctgcatccatgcttcggctacaacaccggttgtgtcccagagtgttccgtctacgtcaagtattattgctttcataatattagattcctcttctttcatttaaaatcttcagaaaatcaaaaaagatttcaagtacagtatagcatagattctgcttgggaggaagaaaaagagacgttggaaagcatttggtatctgtgctataatgaacaaagtttttgactgctttagacaggaataaatagtagaaagaaggtacataagatgatacgttttgcaacagaagaggatgcacaggcattgcttgcgatttatgcatattatattgatacagaaatcacatttgagtatgaattaccgacagaggctgaattccggaagaggattcgaactgtcctggaagaatacccatatctcatttatgaagaagcgggaaatattcttggatatgcctatgcgcaccgccatttggaacgggctgcatatcagtggaatgtggaactgaccgtgtatctgcatccagatgctgtttccagagggatcgggagaagattgtatgaagagttgcttcggattcttacagagcagggaatctgcaatgcatacagtctgatcacccgtcccaatgaaaaaagtgaaaagctgcatgaagcgatgggatttaccctgatgggagttttgaaaaatacaggctataaaaacggcaaatggcgggatgtcagctggtatgaaaagcagttaaacccatatccggaacatccggttccatttcgaaaaattacagaattattgacagagcagaaaaaatgaattatcatgtattaatacaataatacaaatgaggtgagaggaatgaatgaggatctcgttcttgcaattacaatgttgatcattttggcggttgtagtgctgtttatccagatttcccagcagattaaggtgaaacggattcaaaaaatgaagatccagaggcgatttggagagatacctgatatggaggaagtacttccgatcgagaggatcagtgtctatcataaacaccagggaatggaagatgtggatcaggtaacctggtcggatctttctatggatcaggtatttcagcggattgatcagtgtgacagtgcagcaggagaggctgtactttacaacatgctgcactgtacagataacgggcaggcgcagtggaaagacttgctgaagtactatgaggagcaggcggaaccgcgtaaaaaagcagaagcaatcctgatttcccttggaaagagagaagggctgtattatcttccggagtacgtggatacacttcaggcaagtcacgtgggctctgtgttcttttatcgcctgcttcagatccttcttctgggaagtattgtgggcggactgtggaatattcagatcctgccgctggcaggcgtgatggcaattgtcaatattgcggtttatattatgacgcgaatgaaatatgagcagcagatgagcatgatggaattgatcgtacttgtgattgatgccggaaagcggcttacaaaagaaaaatgtgccggtcctgtacagaaagaactggaagagaagttaaaagaactgggaaaactggataagctgatcggaaagatgtctgctatgaggcgaaacagctattccagcgatcagggggtgtttctggattacctgttcgggatcacactctggcagcttatatcctatgaaaagagtgtgaaatggctggagaacaaacgagagagttatctgcagctgtttgaagagatcgggcgcctggatgcggcaatcagtatcgcatcttttcggaaaagtcttccgttttatactgagccggagtttcattctgaaagatctgtacacatggaagagatgtatcatcctctgatcgaagaaccggtgagcaattccatggactggagtcgaaactgtattatcacaggcagcaatgcatccggaaaatcgacatggatcaaggcagtggcaatcaatctcattcttgcccagacaatctgtacctgcacggcaaagcggtttcagatgcatccgggacagattatgacttccatggcagtgagggatgacatcatgaagggggagagttattttctgaaagaaatgaaatatctaagaagaatgctggagcgcttttcagaagagaagctgacgatctgcattattgatgagatcctgaaaggaaccaacacgaaagagcgaattgcggcatccaaagcgattctggattatatgcagagacagaattgtcttgtgatggttgcgtcccatgattatgaattgacagtattgctggaaggtacttatgaaaactatcattttacagagcggatcggagaggatgatatttattttgattacaggctgtatccgggagctgtgacatttggcaatgcaatcaagctgttgaaattcatgaaattcccggaagagattgtgacagaagcaaagcaacaggttacaatggaattggcagatttgcagtaaaaatacatagaaaacagaaaaaatatatataaatccaacaacaataataaagaaagtgttaaaattttgtaaaaaatgaattgacacccggcatgatataacgtatagttgacttgtgtacataattctgtgtcaaaaataaaaaagggagggaaaatttatgaatcttgacaaaatttttcacttgaaagaaaacaacacaaatgtcaaaaccgagattcttgccggtgtcacaacatttatgacaatggcctatattctggctgtaaacccgaatattctggcagagacaggaatggatcacggagcggtctttacagcgacagctctggtagcgttcatcggtacgttatgtatggcaatctttgcaaactatccgtttgcactggcgccgggaatgggactgaatgcgtactttgcatacacggttgtactccagatggggtattcctggaaggtcgcgctggcagcagtactggtagagggtattatctttattctgttatcactgctgagtgtgcgcgaggcaatctttgatgcaatcccgtataatctgaaaaaggcggtgtcggtcggaatcggcctgtttatcgcatttatcggattgcaaaatgcgaaggttgtgatcggaggctctacgcttttaagtctgttctctttagatggatacaataagaatctggctgcggcagcagggggcaaagatttcgtagcggcaagcatgaatgatgtggggatcacagtgctgctggcaatcatcggaattatcattaccggaatcatggtagtcaaaaatgtaaaaggaaatattttatggggaattctgattacatgggtattaggaattatctgtcagtttgccggactgtatgttccgaatccggagcttggattttattcactgcttcctgatttcagtgcaggaatcagcattccaagtctttctccgatctttgcaaaattcagtttagaaggcgtgccgattctggaatttgttgtgatcgtatttgcattcttgtttgtagatttgtttgatacactgggaactttgatcggagtttcttctaaggcaaatatgctggataaagacggaaagcttccaaggatcaaaggagcgctcctggcggatgcagttggaacaacagcaggagcagtactcggaacctctacaacaacgacatttgtagaaagctcttccggtgttgcagaaggaggacgtacaggactgactgcagtaacgactgctgttttatttggtctgtccttgttcttgtcaccgatctttctggcaattccatccttcgccacagcgccggcgcttgtgattgtaggattttacatgctgagtgcagtgacagatattaattttgcagatgcagccgagggaatcccggcatttatctgtatcgcagcaatgccgtttttctatagcatttctgaaggaatctctatgggagttctctcctatgtattcctgaatctgctgacaggaaaagcgaaaaagatcagtccggttatgtatgtactggcagtcttgtttgtattgaaatatctgttgatttagcatcagagagaattttaaatgtccgaataaccttgttgaaaggttgtccggacattttattttcggatcatataatatgtttgatggttctggcggatttcagatatcagatgctgccggagcatataaggcagcagagaatctaaaaattgttttggatcggtgacctggatacgttcactggaaaatggctgttttgcgtacagatctttgactgcttcttctaattcctgacgtgacagttgtttttgttttttcagagctttctgaattctggagacaccctttgaaaagagcaggttggataagtcctgctgctgtctctgactgcgccagagtccccagccgtaaataagagcggtagcagcggcgaataacagaacaaagggaatatattgaagaaaagacatatcaataaacctcctttagctcgatcagatgatgatcctttaaaatctccagaaaccggatcagacgggcaagtggtttttccatttttggaaactgtgactgcagatccagtgagagctgatgtacggttttctgatcattgatcgactgccagagaaagctgccgtagtcatccagcttgatcgcgcttacctttggacgtttgaaaaagcgctgtgcgatccggtgataaaatcctctccattcgatcatgaccgtaacctgtcctttgttgtttgtttcatactcgatctcaggatttttgacgacaataaaatccatataattctgatttgaaatcttctttttctttgacataatgtctcctttttaaaataataaagaataagtacagcctgtctttcgacaggccgtatcttctgttttctgctgtttcagtgaatggaataaaaattattcgcttttctttccgcctttgatacatactcttgcgagatataataaaagcaggataaatacaattaagcttccgatttctccgattgagaattttttggagagatcgatgatcttatctaattttgcaacggcaaagattgcgaggatgacacccatcaatccttctccggcgatcagaccggatgtgaagaggattccgtgatccacgcttgcctttttctctttttcagagacgtttcgtttgtccatgaacagacggacaagtccgccggccataattccggcatttaagctgaatggaaggtacataccgactgcaaacggcattaccggaactttcaggatttccatgacgattgctacacagacaccaatcaggatcagtgaccatggaagttctgcgctcatgataccttctaccagcattttcatcatcgttgcctgtggagcagggatcgcttcagatccatatccccatgcattgtccagaagctgcaatacaaatccgatcgcagcagcagaaacaacgacaccgatcatctcaccgatctgctgtttctttggagttgcaccgacaataaatccggtcttcaaatcctgtgaacagtctccggcaatcgctgcgatgacacagataataccaccaattgcgatggcaccagtcatacctttcactccggttgtaccggtagctttcagaagtaatgtggcgatcagaagtgttgcgatcgccataccggataccgggttgttggaagatccgatgagtcctaccatacgggaagaaacggttgcaaagaagaatccaaatacaataacgatcagagcgccgattggattaaccgggaatgccggcaccagccagatggcaattccgatcaccaggatcataacaagtaagaatggcatcggaatgtcctgctctgtacgcagtgctgaagcactgcttttctttttcatactctgcattgcctgtttaaaggtcttcgcaatgagcggaaggctcttgatcagactgatcacaccaccggttgcaacagcacctgcaccgatatatttgatgtaagttccccagagatcacttggagccatctgggcaatcggatcggtcccagggaaaattgcctgtgcatctgcaccgaacagtgcgatggcaggcatcagtacaaaccagctcaatgtacttccggccagcatatagctggaaatcttcggtccgcagatgtaaccgacacctgccagtgcagggagtacctggactccaacggaagaaccggcataggctttgatgtcatatccaatctcacttgggaagactttcagtccgtctgcgataaatttgtaagcggcagcgattcccagaccggagaataccgtacctgctttgcttccgccttcttctccggcaagaagaacttctgcacaggcagtaccttccggaaacggaagtgtgccgtgttcttctacgatcagtgcctgacgcagaggaaccataaaagcaacaccgagaagaccacctactaatgcaacaagaaagattgtgatcatactcggagaatcgatcgttccttcttttgcccacaggaacagggcagggagcgtaaagattgctccggctgcaacggattcaccggcagaaccgatcgtctggacaaggttgttttccagaatggagtctctgcgaaggatgacgcggatgattcccatggaaataaccgccgccggaatagaggcggagatcgtcataccgacacgcagacccagatatgcattcgccgcaccgaaaacgatggcgagcagaataccaatcaggagagaggttaccgtgaactccggtacgacacggtcggccgggatatacggcttgaaattatttttgttatcagacatgtataaatttttcctttcttttctcaaaatctctttcccaatccatctgaaattacagcaaaatctattatatcagagcatccctgcattccccagagaacgcggggatgtcataatatcaaaaataaggatatgttactggttacagtaacaagtctatgcaagtttttttaagacatctgtcaagagctcatagaaccgttcgaaagaatccagcggcagatgttcatccggtgtgtggcatccgcggatcgtagggccgactgcaatggcatctagtccagggatcgcatcagagaaaagtccacattccagacctgcatggatggcttcgatcttcagatcatcgtggaacagttctttgtagctttgcacaaaaacatcgcggatcggagaaacttctgcaaaactccagcccggatactcgccgtgcatgctgacttcgaaaccgaaggtttctgccagaaggcagagcttttctttgagtgcgctcatcagtgtggcaacagaagaacgtggtgcaaatacaagggatgcacttgtctcatcagttgctgcaattccgagatttaacgaagtgactgtaaaaccgtccaggttcatgttgcggaattgtacaccgtttggcgcaagacacattgccgtgataaaggcttttccatcctcggcagagatcacatctgcagttccgttttctgtgcttacaaggaactgaaatgccggctcatacggacagatctcggatgaaaagtcagcagagagtgccaaagccagattttccgcattttttgcagcaacttcatcagaatagaacagagttgcggatgtctcacgagggatggcattgtcctttgtaccgccgttaaaatcaactaaaagggcatcggtattgtggaacagatgattgatcatacgagccatcaacagattggcattctgatgttctttgttgatatctgttccggaatgtccgcccagaagtccggtcgcctccagatggagcagcatcccttcttttttactgcgggtgattggacgggtgagaccgaaacgaagtcctcctgcacagctgactgtggcaactccctcgtcctcggaatccagattgatcatggtacgagctgaaagaagggatttatccagtgcttctgctccgttcaatccgatctcttcctgtgtagtgaacacacattccagtgccggatgtgtcagtgtatcgtcatctaggatcgcaagcatgcatgcaacggcagctccgttgtccccgccaagggtagtgccgtttgcggagagtacgccgtcttttatgatcagatccagagggtctgttgtaaaatcatgtgcaacgcctgcgagtttttcacataccatgtccgtatgcccctgcagcataacggccggtttttctttagcccctgcgcttgcaggctttttgatgatcacattgaaaagtgcatcccggtgataccacagatttcgttcttcggcaaatgccacgagatagtcactgattgctttctcgttggcagagccacgaggaatggcactgatgtcttcgaaaaagtgaaataatttttctggtttgtatcctgtgattttataattcatagatcatacctcttttctaatataaatatcgttcgttttattctagcatttttagcgtggtaaagcaagaaaatcttagaaaatgaaagtggttcagcggaaaatcaaaaaatccgggaaagacaggaaacgaataggaagaggaggttctgcatacattttggataagaggcgtataacggcagtgcagaatatgaaaagagaagcagaaaaagaaaagttaagagaacggtttgcggcggctgcaaatatgccaaaggatgtggtgttaggggcatctgtcgtgactgtgatcggaaacggggaaatcagtattgaaaattaccgcggaattttagaatatacaggagagctgatccgggtacagacgaaaaaagggcagatccaggtacacggaaagggactgcagattgagtactatctgaatgatgagatgaaaataacagggaagatccatacccttgaatatgaaatgtgaggtaaacagcaatgcagagaatcctgcgttttttgagaggatatgtaaaaatcagaataaagggatactccccggagcgttttttaaatctgtgcagtcatcatcagatcgatatctggggacttcagccctgtaaaaattcttatgagatgtatgtaaagctgaaggattttcggaaaatccgtccgatcgtgagaaaaacgcgcacgaaggtcgttttagtggaacgcttcggcatgccattttttctaacaagatgtcagagcagaacatggtttctcgcaggagctgtgctctgtatactcctgttgatgttctacacttcgtttatctgggatatccattttgaaggaaatgaaaaatggacggatgaagtactgcttcaatttctggagcaggagaagatcacacctgccatgccaaaagggaaggtagactgcgcggatatcgtgcggaagattcggcagaaatatgatgatattgtgtgggtctcagcctccatcgatggaagcaggctgaaaatacagatcaaggagaatgaagatacgtttcaggaggtgcaaaaggaagaaaaaccctgtgatctgatcgcagaacaggacggggtgatcacaaagatggtgacacgttccggagttcccatggtgcatgtcggggatcaggtgaaaaagggggatatccttgtgtcaggcagaatcgaggtgtgcaatgatgcaaaagaggtggtagaatatcagtatgagcaggcagatgcggatattagggcagacacgcagacagaatatgaggatgaaatcagcacatactatgaagaaaagaggtatcagaaccaaaaacggatgcaggtttttgtggaatttaaaaactgggaatgtcatcttggaagtgtgaaaaattcttttccgaaaagtgaacaatatgtgatgaaacgtcaggtgaccctgggagaaaattttcatcttccactattttatggggtaaaagttgcaaaatcataccagataaaagaaaaaagatatacaaatgaagaaattcaaaagaaattgagcgaaaacttcaaacaattttcaaaggaattgaaggaaaaaggtattcaaatacagggaaatagtgttaaaatacacataggcaaaaaatctgcggttgcaaaagggagcttatacctgaatgaagacattgcaaaaaaagcagatacagaaatattagagattgaaaggaataagaaggatgagtctttcagaactgatgattgatataccggcggagcacgagagaaatgtgttcgggcagtttgatgcgtatgcaaaaaagctggagcggacgtttcatgtgacactgatcgccagagaaggcaaagtgaagatattaggtgaagataaaaatgcagagaaggcaaggcgggtattggatcagcttgctgctctgtcaaaaagaggaaatgagattacggaacagaatgtagattatgccatgtcactggtctatgaggatcaggaggaggcgctggtggagatggatcgggaattgatctgtcacacattgcagggaaaaccgatcaaaccgaagacgctgggacagaagcgttatgtagatgccattcgggaaggaatgatcacgtttgggctgggacctgcgggaaccggaaagacctatcttgccatggctatggcgatcacagcgtttcagagaaatgaagtgagccgtattatccttaccaggcctgcgatagaggcaggagaaaaactgggatttcttccgggagatcttcagagcaagatcgatccctatctgcgtcctctttatgatgcattgtatcagatcatgggagcggaaagttttgcaaaaaattcagaaaaaggtctgatcgaggttgcacctcttgcttatatgagaggaagaacactggacaatgcgtttatcattctggatgaggcacagaatacgacgccggcacagatgaaaatgtttctgacaaggatcggatttggttccaaagtcgtgatcaccggagatgccacccaaaaggaccttccggcaggaacggtttccggtctggatgtagcagtcaaggtggtaaaaaatctggaggggatcagcatctgcacactgacgagcaaggatgtggtgcggcacccgcttgtacagaagatcgtaaaggcatatgaagagtatgaaaagaagagcacccgtacaaagggcggtacaaaaaggagaaaatcatgagtttgtatttagaagaagaaggagaaatcacacttccgtttgaaacgaaagaagtggcagatctggtggtggaagccgcattggaatatgagggatgtccttatgaagcagagatcaatctgctgctgaccacagacgatgagatccaccggatgaacgaggagtttcgtcagatcgaccgggcaacggatgttttgtcgtttccgatgctggaatatgagactccgggagatttctcgtttgtggaagaggaggccgaagcatttaatccggaatctggagaactgatgcttggtgacattgttatttccaaggagaaggtacttgcacaggcagaggcctatggacactcaccgaaacgggaatttgcatttctgatcgcacacagtatgcttcatttgttcggatatgatcatatggaagaagaggagcgtctggtcatggaagaaagacagcgtgagatcatggaaaaagtccagattttaagggcgtgacggaggagacggatggcagatatacagaagaacaaaagaagaaaaaaacagtcgaaagagaatgaatttttgatacagggagcaatccttgcagcggcggcagtgattgtaaagatcatcggggcattgtaccggattccgctgaccaatattatcggagatgagggaaacggatttctcggatatgcatatgagatttatgcgatggcactgatgctgtcctccttcagtcttccgatcgcggtatccaagctggtctccacaaagatggcgatgcaccagccaagaaacgcctttcgaatttttaaatgtgcaatgatgtttgcggtttccgtgggggcagttgtggcactggcaatctttctgggggcagatatgatctccagacatctgatggaatcgccgcttagtgtctatacactcaaggtgctggctccggcgctgtttatcgtggcagtgctcggtgtaatgcgcggatattttcagggaatgggaactatggttccgactgcgatctcccaggttttggagcagatcatcaatgcaacagtcaatatcgtaggagccagcatcatgatcaaagtggggatggcagctgcgaaaaagcaggacaatcctttgcttgaaccggcctatggggcagcgggaggaacggcgggaacggctacgggagcactggtcgcactgttgtttttgatgtttgtgtttgtactgtttcaaaaagtgatgatgcggcagatgagaagagaccgcacgaaacatcaggatggatatgggcagattttgaaggttcttcttttgacgatcgccccgatcctgttcagtacggcaatctataatatcaatcagattattgacctgaccttgtttgcaaagatcatggcagcacagggagttaccttgaaagaatatatcattccacagggaatttacacaggaaaatacaatacgttgatcaacatcccgcttgcgatggcgaacggacttgcagcatctgttattccggcactgacagcggcagttgcctccagaaaccggacgcagatgcagaataagatcaatcagacgatccgtcttaccatgctgatcgcgattccttgttttgtgggatttgtggtactggcatcgccgatcatgcagttcctttacggagattccagaacggagcctgcactgatgctggcatccggggcgatcacagttgtgttgtacagttcctcaacagttacaaactcgattctgcagggactggaccggctgactgcaccggcaaagaatgcgctgatttcactggggatccatcttgtggcagtccttttgatgctggttgttttcaaatgggggatttattctctcgtattcagtaatgtgatcttcagtttttgtatgtgtgtactgaatatgaaggatgtatataaggcaagtggattcagacaggatttcaagacctgttatatcaagccgtttctggcagctttgatcatgggagtggcggcatttgtgtccaataagcttcttagcgccctgatgccgggaagatttctggcaaatggactttctatcatcattgccatgctggtgtacgcagtggcggtgatccgggtaggaacgctttccgagtcagatatgctggcacttccaatgggcggacggatcttaagagtctgcaaacgttttaagatttttccacaggagagagacctggacgatgatgatgacattgaatatctggattgacaaaatcaagtgaactgaataaaaccggtacaaagagccaatactgtatgaaaaaaggagtcggacttttatgaagaagaaatactgtattggcttttttgtggtcttgtttgtgtttgtcagtctgctcggaatcggatatcaggtgagttaccagtatgtgatggacaggcagatggcgcggcagcaggataaacagcaaagaagtgttgccgtgaaaggggaagcagaaaaaaatgaaggatattatctggcagagctgcatggctatgtggtcgtctatctgtctgatcaatctacaatttatgaatttacagacattccgtttgaagaactgccgaaagaagtgcagacaaatgtaaagcaaaaaaaatatgttgaaacagaggaggaactttacgcatttctggaaaattattccagctaaaaaacagcggggtagacgaaaatcgagaaatagtgtaagatggagaaagaatttttgggaaaggataagattatggacgaacaaaaggtaaaaagaatcaatgaactgtatagaaaatcaaaagcagaaggactgactgatgcggaaaagaaagaacaaaagattctcaggcaggaatatattgatgcattcaaacgcaatttgagaagtcagctcaataatattgatgtggaagaaaaagacggtacaatcgtcaatctgggagagaaatttggaaacaaagcgggacattagaaaacagatgttatgcgccagagaccggctgacagacagagagtgggagacatacagtgacaggatcacagagcaggttgtctcccatcctttatttgtgcaggcgaaagaaatctggtgttatgtatctatgggaaaagaagtgtgtacagaacaaattctggtaagtgcgtggagagcgggaaaaagaaccgcagtgcctaaagtgaccggaaaacgggagatgaagttttactacatagaatcgttgaatgatctggaaacaggagcgtttggaattttggagccgaaagaagagaaaaaaggggcagactgctgcctggaaaaatcggatctcttgatgcttgttcccggcgtttcgttcgatccggcgggaagaaggatcggatatggaggaggattttacgacacgtatcttcagaaaatggaaggatgccatacgtttggacttacgtttgaggtgcagatggcagatcagattcctgctgaggcacatgacattcggatggaatatgtgatgacagaaaagaggtgctggaaatgctgacaggattaccgaaagatccgatacttcttctaagcgtggtaaatacaaaactgagagattattatccaagcctggatgctctctgtgatgatatggacgtttcaagagaagtgctggaggaaaaactcggcatgatcgactacagatacgatgcagaaaaaaatcagtttgaatagtggatgaaaggtaaggcagggaaatatccctgtcttttgaaattttataaacttagaaggttttactggataaatgcaggaaattaatgctataatacttcggactgcatgcaatgtgcagacggcttcagtgttttggcttaataaggaacaatgtgcaattcattggcagcttatccctgaggtaaggcggacaaaatttcagataccattgcagagaattctgtgagaaggtgaaatggcgggagatgccaagccctaagacttgctgaagtcatcttacgatttcttgataagaagaaagagaaaggggacgaggtagatgaagacctgatcatgaccttttatcaatagagcaactgggataaaattgataaagaaaggtcaaagtttatgaaaaagaaaatagtaagctgcatcctgtgtgcagcagcgacgatatctcttgtttccggatgtggaagcaataaggagacagaaactgataaaaaagaagctcatgcagaaaaatcggtacaatcagaagatcgtaattatgaaccggttacaattcagctgaatctggagcgatccgggctgggaaaaaatgtagagtatacctttaagcaaaaaccggatcatgtggttgcttccggagatcagatggcagatttgttttttgatctgggcttagaggagcagatggccggatacacgaaagggagttgctggagtcttgtctcggaatatcctgcaagagattctgtaccacagatcgcagaacccggagtgaacctgtcatctgtttcaaaggaagaactgcttgctacaggctgtgattttctgatcggctgggattccgtattttcagataaaaatttcagtacagaattctgtgacgaaaatggaattgccatgtatttcccatatgtatgctcagacagtgccacatttgaagatttgtacaaagactatgagacactgggcaagatttttcaagtggaagaaactgcagagcagaaaatacaaaaaatgaaggatacacttcaggatgtgaaagaggcgcttggagaagatgcatacaagaacccgaaaaaagtgtttgtctatgattcgggagaagatgccccttttacagcatgccaggggatgccgggagatattttgaaatcggcaggcgccatctctatttttaatgacattgaagccgggtgggcaaccccttcctgggaagaagtggtagaacgtgatccggatgcaatcctccttttagactatgatggagatgtagaagaaaaggcagaatttcttcgcaccaatgctgcaacaaaagatttaagggcaatcaaagaaggaaaaatctattctgcatgctgtgcagacatgcagggctctgccggatcagcagctgcagttgaagaaattgcaaagcagttatatccagattgttttcaataggaaagggagttcttctattacatgaaagaattaaataaaagacagaaaagagtaaggcacctgtccctgttttgcgctgtatttgtgtgcagtgttttagcggtaggttgttccgtttcctttggagctgtcaagattcacccttttgaagtatttcgtattattatgaaccatctgtcagggcgggagatatttttcccgacatgggaaaccaatatggaaacaattatctggaatatccgacttccaagagttgtgcttgcgtggtttgtaggtgccggactttctgtgtgtggagtactgatgcaggcgttgacaaaaaatgctctggcagatccttatgtacttggtatttcttccggagcttcagcaggagcggtatgtgccatcatcacaggctgttttcattttgcaggcggatacggaaccatgtttggagcaatttgcggagcggccctggcaattgtattatccatggcgattgcaacatataagggaaccgttacttcgacacagctgatcctggcggggattgcgacttctgcgttgtttagcgggatcaccaatctgatcatttacgggtatcataccggatcggataagacaaagacagcacaatactggatggtaggttctttgagtggcgcaagctgggagaaagtcaaatatgttgcagctgcttttctgattacagtctgcatcattcttctttttacaagagaactggatatgctgcttttgggagatggcactgctgagaatctgggagtcaatgtaacaagaatcaaaatggttgtgatcatcatggctgccgtattgaccggaattgtggtctctgtcagtggagtgatcggctttatcgggcttgttgttccacatattgcgagaagaatggtaggatcacggcatacgatagtattaccgtttgtaattgttttgggcggattgtttactgtactggcagattttctctcgcgggtgatcgttgcaccggaggagctcccaatcggaattattgcggctttgtccggcgcaccgtttttcctgtatctgatccgcaggggaaggaggaagagcacatgaaccatagctttttgacagttcgcggattggactacagtattgatggaaccgagattctgcaggatgtttctctggaagtaccggaaggcacttttgtcgggctgattggtcccaatggctgcggaaaatcaacgttgctgaaaaacatatacaaaacgtacagaccacagaaagataccgtttatatcgacgggaaggatgttgtttcgctgtcagcgaaagagatggcaagacaagcagcagttgtcgcacaggaaaatcagaccgaatttgatctggaagtgcttgatatggttatgtatggacgctatgcacatcgtaggtttttagaaaaggaaacagaagaggatcttgcaatctgcaggcgttttttagaagaagtgggactgaaaggatacgaaaaccgctcttttttcagcttgtccggaggagaaaaacaaagggtgctcatggcaagaacgcttgctcaggagagcagactgattctcctggatgagccgacgaatcatctggatatccggtttcaatatctgttgatggagatcttaaagaaacaggatgcgacgattttttcttccgttcatgatctgaatattgcagccatgtactgcgacagaattttacttatggatcgggggaggatcatcaaagcgggaacacccgaagagattcttaccgaggaaaatattttacaaatttttggaatccatgcgcagatcacgaaaaatccgattacgcaaaagatacaagtgtattatattccgaaaggataacagaggattgttttatcttgaaaaaccaaatggattcgattataatgaaagctcatatggaatgctaagatatacgaagagatagagaggaagacaattcatgttggagaagaaacaaacgaagaagatagaagagattttaactgcaatcgatctggaacagccggctccggcagaggaacctatgcgccagtattattttatggaaaaagcacgccgtcttgtcaagacccaggcggaaaccctgggacgtccgctgacctttcatgtaacaacatttggctgccagatgaacgcaagggattcggagaagctgaccggaattctggagcagattggatatgtggaagaggaagaagagaatcaggcagatttcgtaatctacaatacctgtacggtgcgtgaaaatgccaatcagaaggtatatggacatttgggacagctcaaccgtgtgaaaaagaaaaatccgcatatgctgatcggactctgcggatgtatgatgcaggagccggaagtagtcgagaagttaaagaaaagctatcggtttgtggatctgatcttcggaacgcacaatatttttaaattcgcagagctggttgccacaagactggaatctgatcggatggtgatcgatatttggaaggacacagacaagatcgtagaagatcttccgagtgagcggaagttctcattcaaatcaggggtcaatatcatgtttggatgcaacaatttctgcagctactgtatcgtgccgtatgtgcgcggacgggagcgcagccggaatccgaaagatattatccgggagatcgagagcctggttgcagacggagtggtggaagtgatgcttctgggacagaatgtcaattcttatggaaagacgctggaagaaccgatgacatttgcacagcttttacaggaaatcgagaaaatcgaaggactggagcgtatccgttttatgacctcccatccgaaggatctctccgatgaattgatcgaggtgatggcgcagtcccaaaaaatctgcaagcatctgcatcttccggtgcagtccggaagcacgcggatcctggaaaagatgaaccggcgctatacaaaggaacactatcttggactggtggagaagatcaaagcagcagttccggatatttccctgacaacggatatcattgtcggatttccgggagagacagaagaagattttcaggagacgctggatgtggtgcgaaaggttcgctatgacagcgcatttacctttatttattcaaaacggaccggaactccggcagcagtgctggaggaacaggttccggaagagattgtcaaagaccgctttgaccgtctgttaaaagaagtacagagtatttccgccgaagtgtgcagtgtgcataccaaaacggtacagcgtgtgcttgtagagtcagtcaatgatcatgatgattcacttgtgacaggaagaatgagcaataatctcctggttcatttcccgggagagaaagatctggttggaaaactggtggatgtccgtcttgatacttgcaaaggattttattatctcggtgaaatggtagcatccatccgggtataatctggcaaaaaacgcccaaactatctgtatgagtcgaaaagacctgcagacagggagggcgctttttgtgaaaaaatggagcgaaaatttatttttatgggctttgggaggcagtctttattatggatttgaagttttcttccggggattttctcactggagtatgttcgtgcttggaggaatctgtcttttattttgtgccaaacagggactttggaccggatggagggagccgttatggaaacaggtgctctggtgtacaatctttgtgacagcagcggaatttatcacgggaatgatcgtgaatcagtggcttggatggaatgtatgggattatacaggaagaaaatggcagctgttcggtcagatctgtctgccgtttaccattattttttccgcactgtgcgtgatcggcattctgctctccgggtatcttctttattggttatacggggaagaaaaaccacattttcacgtgctttaggaagttggaaggcggacaaaattggatctggtacattgaactgaatttccaaagatgctataatggcaaaggaaaaaatacacaaaggagaaaaacgtgtggcagaattaacaccaatgatgcagcagtatatcgagacaaaaaaacagtatcaggactgcatcttattttatagattaggcgatttttatgaaatgttttttgaggatgccctgactgcatccagggaactggagattacactgaccggaaaaaactgcgggcaggaagaaaaagctcccatgtgcggagttccatatcatgcagtggaaggatatctgaacaagctggtgtctaaagggtataaagtggcgatctgcgaacaggtggaagatccaaaacaggcgaaaggaatcgtaaagcgtgaggttgtacggatcgtgacaccggggacaaatctggacacccaggcactggatgagacaaagaacaattatatcatgtgtattgtctacattgcagaccggtatgggctttccatcgcggatgtaacgaccggagattattttgtaacagagctggaggaaagtgcaaagcttttggatgagatctatcgttttatgccgtctgagatcatctgtaacgagtcttattatatgagcggcatggatctggatgatttaaaagaccgcctgggaattacaatctactctctggattcgtggtattttgatgatgcggtctgcagacagaaactgctggagcatttcaaagtagcatcttttgccgggcttgggctcgaagattatgactgtgggatcatcagtgccggggcgcttctgcagtatttatacgaaactcagaaaaattccctggctcagctgacacatattacggcatatacgacaggaaaatatatgatgctggacagttccacaagaagaaacctggaactgtgtgaaacgctgcgcgaaaagcagaagagaggctctcttctctgggtgcttgataagacaaaaacagcaatgggtgcgcgtatgctgcgaaagtacgtggagcagccgctgattgagaaaaaagaaatccttcggcggctggatgctgtggaggaattgaaagagcaggcgatctgcagagaagagatccgggaatatctctcaccggtttacgatctggagcgtctggtgacgaagattacatatggttctgcgaacccgagggatctgactgcatttggaagctctctgacgatgcttccgccgatctgctgtattatggaggatctgcgtgcccctcttttggaggagataaaagaagaactggatccgctggaggatatttctgcgctgatcaaagaagcgattgcagaagagccgcctcttgcgatgaaagaaggcgggattatccgggatggctatagcgaagaggtggatactctgcgccgcgcaaaatcagaaggaaaggactggcttgcaaagctggaatcagaagaacgggaaaagaccgggatcaaaaatctgaagatcaagtacaacaaagtgtttggatattatctggaagtgacgaattcatttaaggatatggttccggattattatacgaggaaacagacacttgccaacgcagagcgttacattatcccggaattaaaagaactggaagataccattcttggtgcagaagacaaactgtatgcgctggaatatgagatttattgtgatgtccgcaatcagatcgctgcccaggtggagcgcatccagacgactgcgaaagcgatcgcaaaagtggatgtgtttgcatcgcttgctctggtggcagaacgcagcaattatgtgcgtccgaagatcaatgaacaaggtgtgatcgatatcaaggacggacggcatcctgtggtggaaaagatgatcccaaacgatatgtttatcagcaacgatacctatctggatgataaaaaacagcggatttccattatcacgggaccgaatatggctggaaagtctacgtatatgagacaggcggcgctgatcgttttaatggcacagcttggatcttttgttccggcatccagtgctaatatcggtctggtggatcgcattttcacccgtgtgggggcatccgatgatctggcatccggacagagtacctttatggtagagatgacagaggttgccaatattctcagaaatgccacatctaagagccttctgatcctggatgagatcggaagaggaaccagtacctttgacggattgtccattgcctgggcagtcgtggagtatatcagcgacaacaaactgcttggtgcgaagacactttttgcgacacactaccatgagctgacagagctggagggcaagattcacaatgtcaacaattactgtattgcggtaaaggaaaagggagacgatattgtgttccttcgcaagatcgtaaaaggcggagcggataagagctatggaatccaggtggcaaagctggcgggagttccggatgttgtgatcacacgcgcaaaagagatcgtggaagagctgagtgatgaggatattacgaccagagtcagtgagatcgcatccagagaaaaagagcagaagaaaaaacagaagacgaaaaaatatgacgaggtggatatggcgcagatgtcattgtttgatacggtaaaagacgatgacgttctggaagaattaaagagcattgatgtgggaaatctgacgcctgtcgatgcactcaataccatttatcgtctgcagaataaactaaagaaccgctggtagaaagtaaaggagaacacagatgccgcagattcaggttttagatcagattacaatagataagatcgccgcaggtgaagtgattgagcggccggcgtcgatcgtcaaagaactcgtagagaattccattgatgcaaaagctgcctctgttaccgtggagattcaggatggagggatttctttgatccgcgtcacggacaatggaagcgggattgaacgggaagatatccgcaatgcatttttgcgccattccacgagcaagatccgcaaagtggaagatctggcacatattgcatcactcggatttcggggagaagcactttccagtatctctgcggtgacaaggacggagctgatcaccaagacgaaggaggatacatttggaacccgctatgtgatcgaaggcggagtggagcagagtctggaggatgccggggcaccggacgggacgacctttcttgtgcggcagttgttttataatgtgcctgccagacggaagtttctaaaaacaccgatgacagaggccgggcatgtacaggatctgctcatgcgccttgcactttctcacccggaggttgcatttacttttatcaataacggacagacaaaaatgcggacatctggaaatggaaaattaaaggatgtaatctacagcatttacgggagagaggccgcggcaaatctgatcgaactggattattccatggatggtctggtgatgaaaggatatcttggaaaaccggtgatcaccagaggaaaccggaattttgaaaattattttgtaaacgggcggtatgtgaaaaatgcgatgctctccaaagcaatcgaagatgcatacaaggactttctcatgcagcacaagtttccgttcgtagtcatccactttcaggtggatggtgagaagatcgatgtaaatgtgcatccgaccaaaatggaaatgcggtttcagaggcagcaggatgtctataatattgtgtatgagggggttcacagaacccttctggagccggaactcattcctcaggtggaggcgccggctccaaaagtaatttcacagccaaagagtgaaagtccgtttttattaaagcccaaaacagcaccgcggccaatggagaaaaagccagaagaaaaagaagaaccccatgacgaagcatatttcatgaagaagatgaaggagagagttctttcctatcatcagcgcaattcttcggcagaagtcgcaaaaaaagagcagatcttccggccgcaggctcaggcggagaggatcaaagatgcacttgcccgtgcaaaggaagtggagaagcagccgcaaaagcaggcagaagaacagccggaattgatccgggaaacacctgtctatgaaacgaagcctgtaacagaagaaaaagcagagcagttaaatttgtttgaggagcatcttctgaaacgggagaagaaagcagagtataaactgatcgggcaggtatttgagacatactggctggtggaatttgagaacagtctgtatatcattgatcaacatgctgctcatgagcgggtgttatatgaacgcacgttaaaagagatgaagaacagagaatttaccgctcagtatttaagtccgccgatcatcctgagcctgtctatgcaggaggcgcaggtgctgaatgaaaatatggaccggtttacaaggatcggatttgagatcgaaccgtttggcggagaggaatatgcagtgcgcgccattccggacaatttgtttggaatcgccaaaaaagagctgctgttggaaatgctggacgatctggcagatgggatcagcacctccatgacaccggagcttattgatgagaaagtggcatctatgtcatgtaaagcagcggtgaaaggcaataaccggctttccgcgcaggaggcagacgcactgatcggggaactgttattgctggagaatccatatcactgcccgcatggacgtccgacgatcatcgcaatgacacagcgggaactggaaaagaaatttaagaggattgtatagatgaagaaaccattgattatattgaccggtcctacagcagttggaaaaaccgctgcttcaatcggacttgccaaagcgattggcggagaaatcatttccgcagattccatgcaggtctaccggcatatggatatcggatctgcgaagattcggccaaaagagatgcaagggatctcgcaccatctgatcgatgtgctggagccggaggaagagttccatgtggtgaaattccagcagatggcaaaagaagcactggatgggatctatcagagaggacatatccccattgttgtaggtggaactgggttttatatccaggctctgttgtatgacatttcgtttgaagacaatgaggaggatcattcctaccggaaagagctggaagaactggcacaggaagaaggtgcagaaaagctgcatcagatgctgcggcaggtggatgaaaaggcggcgcttgaaattcatgccaacaatgtaaaacgtgtgatccgtgccctggaattctatcatcagaccggtgaaaagatttccgaacacaatgccaaagaacgggaaaaagaatctgcctataattctgcctattttgtgttgaatgatgaccgggtcaatctttatgagcgaatcaacaaaagagtggatgctatgtttgaggagggacttgtagaagaagttacggcgcttcaagaacgtggctatacaagagggatggtgtccatgcaggggctgggatacaaagagatttttgcttatctggacggggaatgtacgctggaagaggcaaaagaaattatcaaaagagataccagacattttgcaaaacgtcagatcacctggtttaaacgggaacgggatgtgatctggatcaacaagcaggaatatggatatcaggaagaaaagatactggagagaattctgaaagaattaaaggttcgggagatctttccacagaaagaagaggaaataaaatgagagagtgtatgacagagacgatgtatgagaagctggggatttcgaaggaagtttacgagtttggacagacaatagaggcgggattaaaggaacggttctcacagatggatgaagtggcagagtacaatcagttaaaggtgctccatgccatgcaggaaaataaggtcagtgaggggtgtttcaactacgccagcgggtatggctacaacgatatgggaagaaacacactggagcaggtatacgccagtacattccatacagaagcggcattggttcgtccgcagattacctgtggaacgcacgcccttgcccttgcccttgcagcaaacttacgtccgggagacgaactgctctcgccggtgggaaaaccatatgatacgctggaggaagtgatcgggattcgcccgtcaaaaggttctctggcagagtatgggatcacataccgtcaggtggagcttttggaagacggttattttgattatcctgcaatcagggaggcaatcaatgagcggacgaaactggtgacgatccagcgatccaagggatatcagacaagaccaagctattccgtggagaagatcggagagctgatcgcctttatcaaggagatcaagccggatgtgatctgtatggtggacaactgttatggagaatttgtagagaagattgaaccaagtgatgtgggagcggacatgatcgttggttccctgatcaaaaatcctggaggcggtctggcgccgatcgggggctatattgcgggaagagaagatctgatcgagaactgcggataccgtctgacttctccgggactcggaaaagaggtgggagcatctctcggtgtcatgcagtcgttctatcagggatttttcctggcgccgactgtagtcaacagtgcggtaaaaggtgcggtgtttgcggcaaatatttatgaaagactgggatatggagtgattccgaacggaacagagtccagacatgatattatccaggccgtggagcttggcagtgcagagggtgtgatcgcattctgtaagggaattcaggcggcggcgcctgtggacagctatgtcagtccggaaccgtgggcaatgccgggatatgacagtgatgtgatcatggcggcaggtgcgttcgtgcagggttcttctattgaattaagtgcagatggaccgatcaaaccaccgtatgcagtttatttccagggcggactgacctggccgcatgcaaagcttggaattttaaaatcactgcagaatatgatcgatgcaggagtgattgaactggaacaattaaaataaaatcaaaaggagagaccatgagaaaagttgttgtgatcggcgcaggagcagccgggatgatggcggctatttcggcagcaaagcacggcgcacatacagttgtgctggagcataaagaccgagtggggaagaagatcctttccaccgggaacggaagatgcaattttacaaatcttgtacaaacgcctcagtgttatcgcagtgatgatcctaagtttccgtggcgggtcatcacacagtttgatgagaaaaagacagtggagtttttccagaacatcggtgtatatgcgaaaaacagaaacggatatctctatccgaactcggatcaggccggtgcggttttagattcccttcgcatggagatggagcggctttgtgtggaagtgcacacagagacagaagttctggaaatcattccgaaaaagaaccggtttgtcatccgaaccggaaatgggaatgtgaccgcagaccgggtgatcctggcagcaggatccaaggcggctcctgttacaggttctgacggttccggatatgcgatcgcaaaaaaaatgggacatcggattgtcccggtacttccggcgttggtacagcttaaatgcaagggaaaattctttcagagtatcgccggagtgcgcatacagggatgtgtatctttatatgtggatggggactgtgtttgtcgggatactggagaaattcagctgactcagtatggtatttccgggattccggtatttcaggtcagtcgttttgcagcaaaggcgctttacaacaaacaggaagtaacagcggtcttaaattttatgcctcagatgtctgaggaagagtttacagcatttctggcagagcgtgcgagacttcggccgcaaaagacggcagaagaattcttaaccgggctgtttcacaaaaaaatgattgctctgtgggtcaaatgtagtcgcatttccaaagaaaagccggtgggaacatattctgaggaagaactaagaacgcttgcccgtctgattcagcagtttgaggtgaatgtggaagggacaaattcgtttgaacaggctcaggtatgctgcggcggagtctctacagaagaagtgaaggaagataccctggagtcaagttatgtaccgggcgtttattttgccggagagatactggatgtggatgggatctgcggcggatataatctgcagtgggcatggtccagcggatggatcgcaggaagagaggcagcagatgttacgaattaatcagttaaaattaaaagtaggacacagcgaagaacagctaaagaaaaaactggtacgggaattgaagatccgtccggaagagctgcagaaatttgaaatccgcagacagtccatagatgcgcggaaaaagccggaactgtactatgtatacagtatcgatgtacaggtgaaaaaagaaaaagaggtactcaaaaaacatccaaagaatgtgcagaagacacaggatgtgtactatcagatgccaaaactggaaggagaaacaccgaaaaagcgtccggttgttgtaggaagcggccctgcaggtctgttttgtgcatggatccttgccttggcaggatgtagaccaatccttctggagcggggtgcctgtgtagaggaaagacagcgtgatgtagaggaattctggaaaagcgggattttaaatccaatgtcgaatgtacagttcggagagggaggcgccggaactttttcggatggaaagctcaacacattggtcaaagatacatccgggcgaaatcgttttgtgttggaaacctttgtaagattcggggcaccgccggagattttatacgaacagaagccccacatcggaacggatattctgatccgggtggtaaaaaatatgcggcttgcgatctgtggagccggaggagaagtacggtttcacagtcaggtgacggatattgttcttgatgagacatcgcttgtcggagtgcaggtcaatcaggaggaagagctggagaccgataccgtgatctttgcagtgggacacagcgcaagagatacatttgagatgctctatgaaaagaatcttccaatgcaggcaaaatcatttgcggtaggtgtgcgcgccgagcatccgcagaaaatgatcaatgcctctcaatatggagcagagtctgtgccgggacttcctgcagcgccttataaagtgacagcaaaactggaaaatggaagaggcgtatactctttctgcatgtgtccgggaggatatgtagtcaatgcatcctccgaagaaggacgtttggctgtcaacggaatgagttatcatgcaagagcaggagaaaatgcgaacagcgccattatcgtgacggtgactccggaagattacggaagtgaacatccgcttgcaggaatggaatttcagcgaaagctcgaagaacgtgcctttcgagcgggaggcggaaaaatcccggttcagagactggaagatttctgcaaaaatcagatcagcacttcgtttggaaacgtagagcctcagatgaaaggggcatatgcgtttggagatgtgcgtggaattttcccgcaagtgctggcagaatccattgaggagggaatgcggcagtttgaacataagatcacaggattctcagatggagatacgcttttgtcaggtgtagaaagccgtacgtcttctccagtgaaaattccaagagatgagaatatggagagtgagatcaaggggattttcccatgcggagaaggcgcgggatttgcaggaggaatcacctcggctgccatggatggaatgaaagtggcagaggcggtgctgaaaaaatataacaagatcgggtcatagaatcttcataaaaatttaagaggtcagacctatacatgatttttaaattgtgctaaaataaatcactgtattgtgttatcattcatatttttatgaaaaaagcaaatatgaaagaaatggcatgtgaagagcgcccttatgaaagatgtgagcagttcggagcaagtaatttgacggacagcgaattacttgctgttttgctacgtacaggtaccagaggagagaatgcgcttcaactggcggataagatcttacatcctgtattttcgcagaagggtgtgctgaatcttcaccagtggacgtacgaacagctgatgcagatcaaaggaatcgggaaggtaaaggctatccagattttgtgtctggcggagcttagcagacgtcttgcaaaagcaaccgcacaggagggactgaatttttcaaacccggcgtccattgccagatattatatggaagatttaagacatgcaaatcaggaacagatgaaactgctgcttttgaatacaaaatccagattgatcggggagacggatatctcgaagggaaccgtgaattcagcagtgatttcaccgagggagctgtttgtggaggcactgcagaagaatgcagtgtccattgtgcttttgcataaccatccgagtggagatccgacaccgagtaaagaggatgtgctgatcaccagacggattcaggaggcggggcggctgatcggtgtggaactgttagatcatatcgtgatcggggataattgttatgtcagtctcagagaaaaaggactggtacgataagaactgcaataaggggacaagacgcatgttcagaaatatatatggcctggatctgggcacatatgagatcaagatatatgataagagaagagaccggatccgcagtgccaaaaatgtgattgcaatccgggatgaaaaagatatttttgcggtcggaaatgcggcctatgcaatgtatgagaaggcacctgagaatattcaggtggtatttcccatgcatcacggcgtgattgcccgctttcatgagatgcagtatcttctgtgcgcattgctgaagcgggaagggagatacccaaacggagcagagtatgtgatcgcagcgccaacggatgtgacagaagtggaaaagaaagcgttttatgatctggtgcatcattcagctgcacgggcaaaaacagtccggatcgtcgatcgtgcaattgcggatgcagtggggatgggactggatgtcttttcggcaaaaggcgtatttgtggtcaattttggcggtgagacaactgagctttcggttctttcgggcggaaaaacggtgctgagccgtctgctgcctgtcggaggtgcggctttagatgaagcaatcgtggccagtgtgcggcacaataaggagtttctgatcggacggattacagcagaacagctcagatggcagtgcggtattttaaaaaacacaaaccgcaggaagctgacagtggcgggaagagatctggcaatgggagttccaggggccaggcagatctcggatggtctggttcgggctgcaatgaaagattctctttcggagattgtaagagcgatccagtccatgatcgagcgtacaccgccggatgtccggagtgagattttaaaatcagggatttatctgacaggaggtcttgcacgttcgcatggtctcccggcatatctgcgacagagtaccggccttcttgtgactgcacacaagaatcctgaattatgtgcagtgaagggactgcgcacgatcatttccgataaacattacagaaacctggcatacgagatgtcagatgaagattataggtggttgagataatatgaagaaaaaaaatcaaaaatccaggtcaaataagtactggcttctgggaacgagtctggtttgcgttttactgatgattttttctgtgtttgcagagagggtagaagggcccttccggggagtggctgatatcacggtgattcccatgcagaaaggcatcagtcagatcggcacatggatcggagatgtcagtgaaaattttgagacattgaaacagctgaaaaaagaaaataaaaaacttcagaagcaggtggatcagctgaccacggaaaacagtaatcttcaggaggaaaaatacgaactggaccgtcttcaggatctgtacaagctggatcagacttatgcagaatatccgaaagtgggagcccgtgtgatcgggaaggactctggaaactggtttagtacatttacgattgataagggaagtaatgacggcatcaaagtagatcagaatgtgctggcaggaagtggactcgtcgggatcgtgactcagacaggtccgacctgggcaacggtacgtgcgattattgatgattccagcaacgtcagcggtatggcactttctacttctgacaaatgtatcgtaagaggagacctttctttgatcggagaagggaagatccggtttgaacagatggaaaataatgatcatgatgtagaggtaggggagcagatcgtcacttctcacatcagtgataaatatctgcagggacttttgatcggttatgtcagcgagatcaatgtagatgcaaacaatctgacccgttccggctatatcactcctgtggtagattttaaaaatctgcaggaggtgcttgtcattacaacgacaaaggcggaaatgacaggaacagatcagagtgagtagagaaaggagcctgccaagatgaaaaagatcaaattaaaacgatttgtgatcacggttgtgatcatgctggcatgttatcttcttcaatgtaccttatttccatctctggaactggcatctgtgaagccgaatctgctgttgattgtgacagctgcctatggttttatgcgcgggccgaaaacaggaatgtggatcggatttttttcgggacttctgatcgatattcagtttggaacggtgctggggctgtatgcactgatctatctgatgatcggctatgtgaatggcctgttcagtgaaacttattttgacgaagacatcaagcttccgttactgctgatcgcaggaagcgagtttgtatacgggctgttgatctactttttgatgttcatgctcagaggtgaatttgattttgtttattatctgatgcatgtgattattccggaactgatctatacagttggggttacgctcattttgtatcagctgatcctgtggatcaaccagaaactggaagcagaagaaaaaaggagtgcaagtaaatttgtttgagaaaatcaaagaagtgtttcatcgtatcgtaaattcccggctgactgttctgatccttgcattctgcgtaatgtttgcgatcctggtgaacagactgttttatcttcagatcgtaaagggagactactatctgaacaactataagctgcagattaaaaagacaagagaactgtcaggaacaagaggcaatatttatgacagaaacggcaatcttctggcatataatgagcttgcctattccgtcacatttgaggacaatattactaatgattccaagaaaaatgatacgatcaacggaattctggagaaagttatgcagattgtagaagcgcatggcgattctgtgatcagtgactttggcgttgttctggattctgcgggaaactatcagtttctgcagacggatgagacattaaaactgcggtttattgcagatgtttatggaaagaaaacaattgatgaactttcagacgcgcagaaacagcagtctgcggaagatgtgatccattatctttgtacagatgatacgtacgggtatgggatcgatgataaaaatctggacaagagtcatgttttaaagcttgtgaccatgcgttatgccatcggactcaacagtttccagaagtatattccgacagtgctcgcatccgatgtcagcgatgagacggtggcggcgatcatggaaaatctggatcagatggatggggtagatattgcagaggactccctgcgccggtatacggacagcaagtattttgcgtcgatcatcggctataccggaaagatttcccaggaggaatatgatgcgctgacaaaagagcagaagaaaaagtattcactttctgatattgtcggaaaatccggactggagcagaccatggatgaggtgcttcagggaacgaaaggtgagatcagctattatacggataatgtcgggaaagtaacggatacggtaagcaaaaaagatcccggagcaggaaatgatgtatatctgacaattgataaggatcttcaggagcagacctataaactgctggaggaaaagctggcaggaatcgtaaggtcaaaacttcgtaatgtaatgaattacgatccgagtacaacaaatgattcaagtgagattatcattccggtagatgatgcctacaatgcatttattgcgaacgagattctggatgagacgcatttcggtgcggcagatgcaaaagcagtggaaaaaacagtgtatgaaatttttaccaaccgtaaggcaagtgtgatccaagagattctggcagaattgaataatgcgggtgcaacagcctacaaggacttgtcaaaagaaatgcaggcctatatggattatgtatgtgataccgtgcttgctaagaacactgggattttaaatatggatctggtggatacaaaagatgagacgtatcttgcgtgggcaaaagaggaaacgatcaatctgaaccagtatttaaattatgccatttcgaagaattggatcgatacatccaagctgtcagaggaagtggcagagcagaaatattctgattccggagagatttatcagggaattttgaaatttttagaagaatatttgaattcagatgcagatttcgacaaacttctctataaatatcttataaaatcagagggtatcagtggggcacagatctgtgccatggtatatgagcagggggtacttccgatggatgaggctgcgtacaatggtctgaataacagaagtgtcaatccgtatacctggttgtgtcagaaaattgaaaatctggagattactccgggacagctggctctggagccttgtacgggatccgcggtagtcagtgatcccaataccggtgaggtgctggcatgtgtttcttatccgggctatgacaataaccgattgtccaataccatggactcgaaatactacaatcagctggttaccggtctgtccagaccattctataacaatgccacgcaggagcgtactgcgccgggatctacgtacaagatgctgacagcagcggcaggacttacagaagggattgtgacagcagatacgacattttattgtaccggagttttcgataaaatcacaccgaacccaaaatgctggatatatccgggtgctcatggctatgagaatgttgtgactgcacttcgtgattcctgtaacgattatttttataacatcggatacgagcttggcatgaacgggcaagaatacgacagcaataaaggcacagacacacttgcaaaatacgcaaaagaatttggactgggtgaaaaatccggagtagagattccggagagcgaaccgcagatatcggatgaatattcggtacagagtgcgatcggtcagggaacaaacaactttacagtcagtcagctgaaccgctatgtggctgcagttgcaaacagaggaactgtatataagctgacattgcttgataagaccacagatgtgaacggtaaagtgatcaaagaatatgagccggaagtgacaaacacgatcgatgatatcagtgacaatacatggaatctgcttcatcagggaatgatcgccatggttcaggatatgtcccagttcaacggaatggagatttccatggcaggtaagacaggtactgcacagcagagtgaggtccatccggaccatgtactttttgtcggatttgcaccggcagaaaaccctgagatcgcagttgccgtgcgaattgcaaatggatatagttccgcttatacagcagaaatcggaagagatattgtcaagagttattacaagacatcagattccgataaacttgttaccggaaaggcagcacagcttggcgctgttacagccggtgactaaaaaaggatgtgaggtgtatggacaagctggtaatgctcaaaagcagccggtacggtctggagatccatctgaatccacaggcggaattttccaaactgcttcgggagatggaacggaagctgaaggcttcgatcaaattttttgaaggagcaaagatggcggtcgaatttaaagaccgcctgctttcacaggcagaagaggatcagttattagagttgatctcgaaaacagccgggattgatgtggtctgtatcatagaccggaatcagacaaaagaaatggcatacaaaagcgtgatagaacacacaatgacgaatgtccggcaaaaggacgggcagttctatcggggaactctcagaaaaaggcagattctggaatcagataccagtgttcttatacttggagatgtggagtatggggcaaaagtgatcgcaaagggcagcgttgtgattcttggcagactggaaggatctgttcatgcaggagcctgcggggatgacaaagcctatgtggccgcgttatccatgaaacctacatatatgcgtatcggaggtgtcaaagcaggcagatcgcagcttgccgtctgcagacagtcttttaagcacccgcagatagcagtcatgggtgaaaacagacttgttctggattcgctgtagacaaattatgaacttaagtgtgaaagggagaatagacatgggagaagtgattgtcattacatcgggaaaaggcggtgttggaaaaacgacgacaacagcaaatatagggattgggttatcgcagctgcagaaaaaagtagtggtgatcgataccgatctcggacttcgcaatctggatgtggttatgggcctggaaaaccggatcgtatataatcttgtggatgtgatcgaaggcggatgccgtctgaaacaggcgctgattaaggataagcgttttccggaactgtatctgctgccgtcggcacagacaaaggataagacctcagtttctccggaacagatgaaaaaactgatcgaagagctgaaaacggagtttgattatattttgctggattgtccggcaggaatcgagcaggggttccaaaatgcaattgctggagctgacagagggattgtagtgacaacaccggaagtgtctgcgatccgggatgcagaccgcatcatcggtctgctggaagcgcacggaattaaaaacaatgatctgatcatcaatcgtctgcggatcgacatggtgaagcggggagacatgatgtccgtggaggatgtgacagagattctggcgattcatctgcttggtgtgatcccggatgatgagcaggtcgtgatcgcgacaaaccagggtgagccgatcgtgggagaggactgcatgtcaggaaaagcatatgcaaatatctgccgcaggcttctcggggaggaaattccgattactgactttggaagatcagaaggactgttctcgaaattcagagatctgttcaaaaagaattaggaggggcagatatgagtgtaccatctgttcacattgcgaaagacagactccggaatctgctcattgcggatcggcttatgtgtacacccgatatgtctgagagaatgacttcagacatttactatacgatttcaaaatacatagaactaaaaccggaagcggttcagatagagataacacattcagatatacatattaaaataacaggagaaaataattgaaacttcaatttttaaatcttaaacagcgatacaatttgaaagattataaattcactctgatcttgctggtactggcagtttctgtgatcggcgtatttatggtggggagtgcaaatgcagagtatcagcccagacagatcatgggcgtggggttaggtctgcttgcaatggttgtaatctcactgatcgattacaagtggatcctgaatttctactggctgatgtatgtggtaaatattgccttacttctggctgttatttttcttgggacagaggcaaatggtgcgacaagatggctggatcttggatttgtgcagtttcagccttcagatctgacaaaattgatcacgatcttgttttttgccagatttttggctgacagggaagaacagatcaataagaaaaagacgattctggaagcaatcggtctgatcataccatctttgctccttgtatataagcagccgagtctttcggcaacgatctgtattgcagcattgttctgtgtgatcatgtttatggctggtctgagctataaattcattggcacagtgctggcgatcacaattcctacgattgctttggtgatcggaattgtagtgcagcctaatcagccgtttttgaaggattaccagcagaaacgtattctggcatggctggaaccggaggcatatgcgacggaggaagcatatcagcagctgaattcagtgatggcgatcggatccgggcagttgaacggaaaaggatacaacagcgatgctacaacatcggtaaaaaatggaaattttattttggaaccgcagacagactttatttttgcaattattggtgaagaattaggatttgtgggttgttgtgtggtcataattttgttattattgattgtgatagaatgtattgtgataggtttaagggcaaaagacaccggagggcgaatcatctgcgggggtgttggcgcactggtagggattcagacatttatcaatatcagtgtggcgacaggaatttttccgaatacagggatatcccttccgtttgtaagttatggactgacatcccttgtctgcttttttgcaggaatcgggttggttctgaatgtcggcctgcagcctaaaaaatatcaatagaggagacgaaagtgtatgaacataggattagtggcacatgatgcaaaaaagaaactgatgcagaacttctgcattgcatatagaggaatattgtgtaagcataacctgtatgcgacagagacaactggaagactggtagaaagtgttaccaatctgagcattcataagtttctgcccggacatcttggcggaaatcagcaactgggagcacagatcgagcataatgagatcgatcttctgatttttttcagggatccgcttgcaccaaagaaacatgaaccgaatgtaaatgatattgtaaaactgtgtgatatgtataacattccgatggctacgaacatcgctacagcagaagcattggttctggccttggacagaggagatttggactggcgtgaaatctacaagtaaaaagcgaagcaggagtaaaaaagtacaaaaaagaactggaattggaaaaggcgcgattgcaggaattgttgtggcagtgttgctgtttctggcattgatcggtactctgatgctgatcttgcatgacaacgcgaaggattttgtttcggaatatgagaagacacattatcgcaagagtctttacaaagcggaaacgtttgcttcccagttgtgtgtaacagatacagatgtggcaatggaaggatacacacaggatgcatcccttcatgccgtgggtctgtttgatgtgcaagggaagaatgtactctatgcagatcagatttttaaaccgttatatccggccagtacaacaaagatcatgacagcgtatgtggcattaaaatatgggaatctggatgatatggtcacggtcagtgaacgtgcgactgattttgacgaggatgagcaggtatgcggacttcaggcaggagatcagctttctttgagagatttgctgaatggattgcttctttattcggggaatgactgtgccattgcaatcgcagagcatgtatccggaagtgtggaggcattcgtggataagatgaatgaagaggcacgaaaccttggggcgaccgggacacattttgtaaatcctcacggactgcagaacgaagatcactatacaacggcatatgacttatatctgatgttcaatgcctgtctgcagaatctgcagtttgtagagatgatttcgcagacatcctatactgcgaatcttacatcggcatctggagtaccgtatacgatgacctgggagcctactaattactatgcatccggagatgctgcagcaccggagggagtcaaggtgattggcgggaagaccgggacgacggatgaagcaggttcttgtctggtgctgtatgagcaggatcagcaggggcgtccatatatttcgattgtgatgggagcatctcagaaatcgattctctatgacaatatgacaagattaatgagttcgggaattaatggaaaataaagacttgaaacggcagttcgcatggaactgccgtttttatataaagtcgtaagagggtgaaacttacacatcacttgctgaattcccgattctgccaaaaaagctgatcagatagagtccgcacaagccgacaagagtgtaaatgattctggaaagccagcttaaatttccaaaaaggaacgccaccagatcaaattggaagattccgacaagcagccagttcactgctccgatgatgacaattacaagagctgtattatcgagccatttcatactgttccctccttttctatgggataattttattatttccgcaaaaactggaaatatacatatagaaatgttataattaacaagttatttaagaggggattaagactgatttcaaggaggtatcaagtttgccagaaaaacaaaaaaagaattcaatcagtattaataaatataaaacaaagagagaattgaatatcggaacgctgattttcgcactgatttttatttatctggtcgttgcggtggtggtgtatgccacagagaaacagatcacggtgtatgaagtacgggaaggcagtattttgaaggatcattcatatacggggttgatcatcagagaggaaactctggtaaatgcggaaagtgacggatatgtcaattactatcagagtggacagagtaaaatcaggacaggcacgaacatttgcgcgatttcgccgcagaagttggatgtttcagagtctcaggagcagggtgagacggcattgagcgcagaggagcaggaaacgatcgttctcaaagcacaggattttaatgagaatttcacatcacagaaattctcttctgtctacagtctgaaaagagatgttgcagaaactcttcagaatgcatccgatcagacgaaaacagcacagcttgacgcagtgatcgctgcgagtgggcaggatgtaaaaacatatccggctgcaagggacggtgtgatggttctgacatatgacggcgaagaaggtctgacaaaagacaattttacggatgcagattttgataaaagcaattacaagagtacaaatctggaagacaacatggaaatagcaagcggagaaccgatttataagcttgtcaccagtgaagactggtcagttgtgattccattggaggatcaaacagcaaaagagctgtccgagacagattctgtgaaagtgcggcttgataatgagaatgacacggtatgggcggatttttcaattttaaaaaaaggaaaacaatattatgggtgtctcgattttgataaatccatgatccggtatgcagataagcgctacttgaatgtagagttgatactggaagatcagagcggactgaagattccgaaaagctcggtgatcaaaaaatcatgttatgcgatacctcaggattatattacaaccggaggcaacagctcagactccggagtgatgatacaggataaggacagcgcggtatttcagcaggttgagatttattatgtatcagatgacgggacaaactatgtgaatctggagagtctgaaagtaggaactaccttgatcaaaccggagtcatcagagacaatgacagtagaaaaaacggcagagttgagtggcgtttataatatcaatcagggatacgcggtattcaatgcagttgagatcctgtgtgagagtgatgagtattatattattaaagaagataattcttacggcttgtcaaattatgatcatatcgtacaggatggagaagacgtaaaagaggatgaagtgatattttaaagtgggaaaggagcttgaaacatgttgaaagaacaactgaaagaggtggaacgccgtatacaggcggcatgtgaccgtgcggggagaaaacgggatgaagtgactctgatcgctgtaagcaaaacaaagcctgtatcaatgattgaagagacatatcaacttggtatacatgtatacggtgagaacaaagtgcaggaattgacagaaaaatatgaaattctgccaaaggatatagagtggcacatgatcggccatcttcagacaaataaagtaaaatatattgtcggaaaaacggcactgatccattccgtagattctttgaagctggcagaaacaatcgaaaaagaggctgcaaagaagaattgtgtccaggatattctgatagaagtaaatgttgcacaggaagaaagtaagtttgggctgaaagttgacgaagtcattcccttcattgaaaaaatttcacaatttcaacatatttgcgtaaaagggctgatgacaatcgcaccatttgtggaaaattcagaggataatcgtcctgtttttgcaaatttacataaattatctgttgacattatgaataaaaacattgataatgttaacgtaagcatactttcaatggggatgaccaatgattatgaagttgcgatcgaagaaggcgcgactatggtgcgtgtaggcactggaatctttggtgccagaaattatcagatttaatttccggataagaaggtacgttttcaattttaaaataactttatgcaaaaagggtacggcataagataggagtgtaaacatgggtgtatttgataaattcttggatatcatgaaattgaatgatgacgaatacgatgatgatgatttttatgatgatgattttgaagatgatgatttcgatgaaaaaccgcatcgttcaattttcggaaacaagaagagcagaagtgatgattttgatgatttcgatatggacgaggacaagcatcttgctccatcctctggaaataaagtgacaccaatgcgtcagcctgcagccagaagaggtgtgaatatggaggtctgtgttgtaaaaccgacttctgtagatgattctcgtgagattaccgagacactgcttgcaggacgtactgtgatcctgaatctggaaggtatggatcttgagattgcacagcgtatcattgatttcatttcaggagcgacttttgcgatcagcggaaatctgcagaagatttctaattacatcttccttgtgacaccgacgaatgtagatatttccggagatctgcaggatcttctcggcggttccatggaaaaaccaagcatgagaggcagatactaggatttattcatatgcagaaggaagaacaacagttggagaagcggctgtcagagctgtcaaatctggcatatagtcgcgatatcgttacatattcggattttttgaatttgaatgaactgaatattttacattccatgccaaaggacagactttacacaaagtttgtcacttttggtggatatggcttggcagagcgtcagatggcggcatttctccctgatgctctttctttgcgtggagaaatgtcatggtgcagcgaggaggaatggattgactatccatttgatattctaaggatttctccgttgcatgcgaaatatgcagagcagctgactcacagagactatctggggacgatcttaggactgggtatcgaacgtgcaaagataggtgatatccttgtagatggaactgatgcggttgtttttgtacatcgcacattacagtcttttttgatggaggaattgaccagagtccggcatacacaggttctggtaaaagagatttcaagagaggattttcagtatgaacccaaatatgaggaaatccgaggaacggtggcgtctgttcgtctggacagtctgctttcgcttgcattttctgcatcacggacaaagctttcgggtctcatagaaggggcaaaagtgtttgtgaacggaaaactgatcacaacgaacagttatcaattaaaagaaaatgatgtgatatccgtcagaggatatggcaaattccgttataatggaacgggagcaaagacgaaaaagaacagaatttatgtatctgtttataaatatatttaacaaagacagaggcaggagtaatacaatggaggaaagaaaaaaaacagggaaaagttatctgtgggcactatttgcatttcttctggcagtggccgcagatcaatttacaaaatggctggcggttacctatctgaaagatcaggatcctttgattataataccgggagtatttcagtttcggtatctggaaaaccgtggggctgcatttggaatcctgcagaatcggcagattgtatttgcagttggagcattgctgattttttttgcggtcgtcttcatttacgggagaattccgcagaaaagaagatttgttccgttaagagtatgtgcgatccttctggcatccggcgctatcggaaatctgatcgatcgtctggcaaggaattacgtagtggatttctgctatttcaatctgattgattttccgatttttaatgtggcagactgttatgtggtaattggctgcatcctttttggaatcctgattcttttctattataaagatcaggaatttgactgggtactgcaaaagaaaggctccagatcatgagagaagaacgtttttttacagcagaagagacagtgacaaatgagcggatcgacaaatttttgtctacgcagattccggacaggtcccgttcctatattcagaaactgatcaaagatggattggttgaagtcaatggaaagcaggtaaaagcaaattataagctgggcagtgaggatgaggtgaaacttcagattccggaactggaagtgccggatattctgccagaggagattcctcttgacatcctttatgaggacactgatctgcttgtggtaaacaaacctaagggaatggtcgtacatccggcgccagggcattatacagggactctggtcaatgctttgatgtatcactgcagggaaaatctttctgggatcaatggtgtgatgcgtcccgggatcgtacatcggatcgatatggatacgacaggctctcttttggtctgtaaaaatgacagggcacatcagattctggccgggcagctcaaagaccattcgatcacccgaaaatatgaagcaatcgttcatggaaacttaaaggaggataccggcacggtcaatgcaccgatcgggagacatccgacggaccgcaagaagatgagcgtccatgcatcccatggaagagaggcagtgacgcactatcgggtactggagcgttttggaaactacacgcatatcgaatgcgaactggaaacaggaaggacacatcagatccgtgttcatatggcaagcatcggacatccgatattgggagacttggtttacggatcggcgaagtgtccgttcagactgcagggacagacgctgcatgcaaggatccttggttttgtacacccttctacgggagtgtatgtgcagtttgatgccccgttgccggagtattttgaagaactcttaaaaaaattgagaaatcagacaggaaattaggaaaaaaggaaacggatatgtcagaaatgtgcacatacgattccttttttgatttttagggagacaaacacatgtttgtgtcatataatagaaaaatgaatacatatgaggtgagaagagaatgaaacgattcagtaaaaaagaaattttttcgattccgaatctgatgggatattttcggattctgttaattccggtgttttgttacctgtatatcacggcagaaacggaacgcgaatatttgtatgcagcgctggttgttctgctctccagcctgacagatctgtttgacggaaagattgcaagggattttcatatggtgacagagctgggaaaggcattggatccgatcgctgataagcttacgcatgcagcactggcaatctgtcttgcaacccgctatcctatgatgtgggcgctgattgcattgatgctggtcaaggaaggttacatgggggttatggggctcatattcctgaagaaaggaaagatgctggatggagcgatgtggtttggcaaggtctgtactgcagttctgtttgcaggacttcttgtcctgtttttgttttcacagcttgaggctgctgtagtcaatggaatcattatgataatgatgggcattatgatcgtgacactgtgcatgtatgtgccggtatttcaaaaaatgaaacatgaggagaaaaaagatggcgaagaataagtattatgcagtaagaaaaggacgggtaccgggaatttatcgtacctggagtgaatgtcagaaacaggtgacgggctatccgggggctgtttttaaagggtttgttacagaagaggaggcacagtcttttcttcattcggggcagagcgcggaggcaaaagagacacatatttctcatactgcctatccatatgcctatgtggatggatcttattttcaggggatttacgggtttgggggatttttaaaactgtctgacgaggaggaagttgttctgcaggggtcaggagatcatccggatcttgcgaaaatgcacaatgtggcaggagagcttctgggatgtatcaaagcagtaaaagaagcggaaaagaggaaaattgcagagctttcggtattttacgattatcagggaattgaatcctgggtgaccggagattgggcggcaaaacaggcaggaacacagaaatatcgcgattttatgaatggtacatccgtgaagcttcattttgtcaaagtaaaaggacataccggtgtagagggaaatgaacgtgcagacagtcttgccaaagaggctatcagtgaaaagattgcattcaatcagcttgcgatcgaatagatatgaaaagagaaagaaaggaatttaagttatgcagataaagaaattgctgcttccgattcttgcgacagtgatgctcatatgtggatgtcagcaaaataatgctgtctccgggcaagatcaattggttacggcaagtgaaaataagacaacctatacggcacggaatattccggaatatgtaggatcaccttatgtggagctaaacaataatatacctgattttcaggagtcagagtatacgatggaagcttttgaacaatatagcgatctggatgcactggggcgctgtcaggctgcttatgccaatatctgtcaggagatcatgccgactcaggaacgggggaaaataggcatgatcaagccttctggatggcatacagtgaagtatgactgtgtagatgggaaatatttgtataatcgtgcgcatctgatcggatttcagcttgccggagagaatgcgaatgaaaaaaatcttatcacaggaacacgatattttaatgtggagggaatgctcccgtttgagaatcaggtagcagattatgtccatgagacgaatcatcatgtcctgtaccgtgtgacaccggtttatgaaggcaataacctggtagccagtggagtcattatggaggccgcttctgtggaagatgaagaaatccgtttccatgtgtttgtctacaatgtgcagccggggatttggattgattatgcaactggagaaagccgggagagtgaaactacagaaagcgaaaaaaaggatgaagaagttacctatgtagtcaacacaaatacaaaaaaattccataaaccagactgtagcagtatccgcgatacaaagcagcagaatcgaaaagaaacatcagaaacaagggaaaaattgatcgatcaggggtactctccgtgtaatcgctgcaacccttgaaaatgaaagctctgtttgaaaattgtattgaatgacggataaatgcagtttttttattgttatttagtgcagattgttgtataatgagcgtatagaaacttcaagaatatgacaggcaaaaggagcgtggagtaatatgaagacgaacacgattattacaataggaagacaattcggaagtgcaggacgggagatcgggtatcagatcgcagattatttcggaatcaagctgtatgataaagagatgctcagcagagcagcgaaagaaagtggtatctgtgaggaaatttttgaaacacatgatgaaaagccgacgaatagctttttgtattctctcgtgatggatacgtattctatgggatattcgggcggatcctactccgatatgccaatcaaccataaagtatttcttgcacagtttgatgcgattaaaaagattgcggatgaaggaccttgtattctggtaggacgctgcgcagattatgctctggaatcttatgataatgtggtgaacgtatttatccatgctgatctggatgcacgtatccgcaggattgcaagaatttataatcttacggatgccaaggcaaaagatatgatcattaaaaccgataaaaagcgtgcaagttattataattattacacgaataaaaaatggtcagactctgaaagctatgaattgtgtctctcaagttcagaacttggaattgaagggacagcaaaagcaatcgagcagtatgtaatgttgaaagagcagattcaaagagatgataaaattctttagaagttaaaaaacagtgaactccccctgcagaaaagataaagacttttactgcagggggactttttatgctcttggatgaatgatccgttcgggccagccttcgatatttccatcaaggattgcatgaaacatcctttcgcggacacctggattttcgtgatttaactgacggagaagttctttgacatattgacgttttgtatatccgtcaacaggacacttgcttttcactaccggaagctgatacttgtttttaaaaccgatgacatctttttcatctacaaacatcattggacgaataacagtcagatcagtacggtccagatatgttttcggagaaaatgaataaaaacgtccttcgaagatcaaggagagcagcattgtctcgataatgtcatctttatgatgggcataggcaattttattgcatcccatttctttaattgcctgatttaaggcaccttttctcattttggcacaaagagagcagggattggattctttacggacatgaaaaagaatctcataaatatcagaagattcgattcggtaggggatattcagttcctgacatagtgcctgaatcggagaaagatcaaaatcttcaaatcccagatctacggtgattgcactgagttcaaatttcttcggatagaagcgcttgagcccatgtagtgcatagagcagagtgaggctgtcttttccgccggaaattccgaccgcaatatgatcgccttcttcaatcattctgtattcatcaaccgattttcgggtatagcttaataacttctgtagttccatggtaaaggtcctttctttgggtttatgttcctattataaggtgaaagagatggaattacaatgaaggagtatgatatttgtctgcattttcctttaaaacaaaatgtagtacgctgtgctataaatagaaaaaataaatagtactatgtactaattcgagaaatgagaaatttgcgttttccaaaggagtatgttatagtagctttgacaaaaaaggaatcaaccagagagggtagatagaatgaaagcacaggatcaaaaagagctaatgcgggaaagaatctgcgattgtgcaaagaggctatttgaaagagagggatatgaacaggtatctatgcggcagattgcagcggaggcaggaattgcagtgggaaatttgacatattacttttcgaaaaaggaagatctgctgaaggagagtttaaacgatattcaggaaactttttcagagagtatccagctgtttgaaatcgatccggaaagaggagagatttcaggaaagccgttctgggaatatgagaatcgaacacttttggaattgctgcttcgatttttgaaaacagtggaacagtttcagaagaatgcagctgtcgtgtatgaaaatctgatttatcttataaagcttctgactttttttggcaggaaatgcatggagatcaggagtatgaaaaaaaacaatttacagaaagaatctgcagacttttgattccttatatatcatgggagtggaaagacacctatacagtcttgtgtaaagaaatctgtgaggtctctttccatcgtatgacattaaaatttatctaatagagcttcgaagctgttcaaataactgactcatttctgacaggtcagcttcttccagattcagggagagtgtttttacattgtcgatgatctgttccggtttccttgcgccgcagaggacatgcaagtccggaagagaagctgcggtcagatagatgatcaggttgctgagggaacaactatatttttcagtatatggggttaatttctgtaaaacgtccaatatgttcagacgggacttttgtgcccagaatttatttttgttgcgcacatctgtcggagagagcaccgtgtcttgtgtcacttttcccgtgagcagtccctgttccagaggagagtacgcctggatggaaacatgatgtttctggcatacaggcaacaattcatccgcaatatgtgtatccagaaggctgtatttttcctgaattacatccagctgtccaagagagcagtacttttcgacaatttcagcagtaacgttggaggctccgatggcacggatcttcccttcttttttcaactggagaagagtatccatcgtttcttccagcggatagagggaaaagtcaggagtctgccagtgtgtatagtaaatatcgatatagtctgtctgcaggcgtcgaaggctgtcttccagatttttacgaatcgcagaggcggaaagatcacggtaaacattgcgtccttccatgactttatgaaagcaaggtgtctcatgatcccattccagcccgcatttggtagagagcaggatcctggaacgattttgctttatggctttgccaactacgttctcactgtgtccgatcccgtagaccggagcagtgtcgaaccatacgattccccgatcaattgcttcctcgatggtgcgaatggagagtgcatcatcattttcgccccaccaggtgcctccgccaattgcccaggtacccattccgatatatggagtttttaaagttgttgttccgattgtacgttctttttgcataagatttatcctttcttttgtcaattctcttagggttcccgcaaagtgacagcttttgcagccatgcgtcggcgttcctcatctattgctgcatagtgttttttggttgtattgacatccttgtgtccgagtacgtctgcgacgagatagatgtcaccggtctctttgtaaagtgtagttccataagtactccgcagtttatgaggggtgatttttttatttggcgtcacctggcgggcatactttttcaccatattttcaactgcctggactcccatacggcggcgctgcgtggataaaaacagtgcgttttcatgtcccggaagaggagtggcagcttcccgtgttgtatacaagtattgtttcagggcatgttcgacttcctcgccaaaatagatgaccatttcatttccaccttttcggacgaccgtaatcccgttatttttaaaatcaacatcctggatatcaagccccacacattctgatacacggattccggtaccaaggagcaatgtgataatcgccagatcccggtttttcgtcttttcatagtaaacttttttctgtccggtgagctcatcgccaccgtgttctacaaagtccagaagagaagccacctcgtccgtatccagacggacgatcgctttttcgtgcagctttggcatatcgacaaacagtgttggatttttctcgatgatctgatgcttgaaatagtagccgtaaaagctgcgcagggcagacatctttctggcaagtcctttttccgtgttggtaatttgtttttcctccggattctggtaaacctttaaatattcctgatattcttcgatatcgacaggagagagctgctccagatcctgcggggtaaactgatcgatggtataatccttgtatacaggattgttttccatcagaaagtgaaagaatacccggatatcatatgcataagaaattcttgtttttgcagaggtggtaggttctgcagcacggaaataatcttttgcaaaagctggaagtgtttttaagatttcccgcagacgcaacgtattgtcaatatatttttgttcatgataagtttttcgctcagttgtctgatttgattccataaaataaaacgcctcgttcttttttatttatgaagttattatagcatattgaaagacaggcaacaatgatatctttgaagggccattgcagaacccacaacaggttcaaaacaggatcattctggaagtagttgttaaaaaacgctaatcttttggaaaaatcagtatttgtcgtatagattgaaacgactgaaaacactgctgttttgagcagttaatttggaatttctactgtaagcggttcttttgcatatacatggcaacctaaccgataaccggcaagaagctgctcttccgagaaccatatttgatccattgtatttactgtggcgtgtccctttacaatccggacaacgcattttgcacagtttccgcgaccgccgcatgccgtcaaaatgtggatatcgttttgtaagagataatcttgtaatcgtgtatttgccggacattctattaacatttgtttaccttctttctgttcctgttttgatcttttttgtttaacggatatattataaagtatgtgattcatactttcaatgcttttataaaaaaggaatgctgcagtacagataagctctatctgcctgacagcattcctttttggagtgaatttatatcaattacatggggtgtaaatgatatctgtatgatataaaaacaattattgtggaaattctgttgtgtaatacgggatgatcaaatgttctccggtttgtatggtttcagattccagctgattgatctgtttcaattctttgatgtattctttcacagctgtttcagattctgagtctatatggcgttctgcaaggctccacaaagagtctccctcctggattacaatgcttttgtagcatttgaattgcacaggctcttccgttcttgaattctgtgcaaaagacagaaagcttccaaataaaaagcacccgcaaaataaaataagtgtaataactgctgacatctttttcttttttctcattgtaaaatccccctgaacataatgaaacaaacaaaaagaacatacgttctgactacacaaagaagtatatcaccagaacgtatgtttgtcaactgggttattatctgtttttttggaaagactactcttctgctgttatggtttcccggtttgcaaattgggagtgatacagcttctgataggtaccgttttttcttaagagttcttcatgcgttccctgctcaatgatatttccgttatctacgaccaggatcaggtcggcattgcgtatcgttgaaagccggtgggcaatgacaaaagaggttcgccctgccatgactttctgcattgcgtcctggagcatccgttccagacgggtatcgactgctgatgtagcttcgtcgagaatcagaatcctcgggttttttaaaatagctcttgcgattgtgagaagctgtttttccccttgagaaatattgttggactcttcattgatcatagagtcatagccatggctcagcgtagaaatataatggtggatatttgccatttttgctgcgtcaactacttcgtcttttcgggcagtcaaagatccgtaacggatgttttcaaaaatactgccggaaaacagccaggtatcctgaagaacgagagaaaacaggctgcgaagatcacttcggtccatgtcccggatatcaattccgtcaattttgatggacccgccgttcacatcgtagaaacgaagcagcagattcatcagcgtggtctttccagcaccggtaggcccgacaatcgcaaccatttgtccggactgtacctggaagctgacatctttcatcaaaagttcatctgtgtaaccaaactgcacgtggtcaaatgttacgtttccctgaatttgggagacatcgatcttaacactgcctttttgtacctcttctgtttcatttaacagcgtaaaaatccggttcatggcagcataggcggactgtacctgggaagacagctgagatacctgggataacggatcattgatctgccagatataacggataaatgcctgcagattcccgacggtgacagaaccgtttatgacaaaaaagcttcccatgacggcaatgcttccaatcgtcagataggtgacgagggatacaaacggcgaaatcaaggaagaaaggaactgagccttaaatgcggcatctgccatcttttgattgactgcagaaaatctgttgcaggaatctttctgtcggttgaaaaggagaatttcgttaaatccgccgtataattctgtaatcgttccgttcaactctcctaccatctcctgctgcagatcaaacagtttttgtgaacgttttacaaatctaaatgtgatcagtatggtcagaggaataatcaaaagtgctgtcagtgccatccagacattgatggaaaacatcatgaagatgacaaacaggaaggtgaggattgctgcaaatacgcgggaaagcgtttgctggagtgcattactcagtgtatcgacgtcgtttgtaacactgcttaaaatatctccaaatgcgtggtcatcaaaatatttgaccgggagacgctggatttttttctgcagtgcattgcggatgtcatgcatagttttctgaatggcgtctgtgaggaaaactgatgtaatcagctgtgagattgtctttaggatgtacagacacaacagaatccccataaaacggaacaggattgaaaattgaacgtgcgctcccgggactccctgcaggattttcgcaccgtcactggcaagctgcgtggtgatctttccttccatcataggattcagggcaaatgtcagattggtcactatgatcataaacagtgcgatcgacaacctgatacggtatggacggacgaacccgagcagttcacggatacagtttcgaaaggtcagtttattctcaggcataagtcaattcctccttgctcagctgggaagctgcaatttcgtaataaatcggacaggatgcaagcagctccctgtgagttccgattccggcaattttgccttcatccagaactacgatcttatctgcgtccagaatcgtagaaacccgttgtgccacaagaaagacgatggcgtttttaatctccggtttcagagcttttctaagtcgggcatctgtcttaaaatccagagcagaaaaggaatcgtcatagatgtagatctccggctttcggatcaaagcacgggcgatcgacagacgctgtttctgaccgccggagacattggttgctccttcaacgatctgttcctggaactgatgtggtttttccataataaaatcatatgcctgggcaatctttgcggcatgaatgatttcatccattgtggcatccggttttccaaagcggatattttcttcgattgttccggaaaacaggtgtgctttctgcggaacaaatccgattttacttcgaagagcattgatatccagatcttcgattttttgaccgtcaatgtaaatatttccagaagcgcggtcataaaatcttggaattagctggatcagggagctttttccggaacctgtgcttccgataaaggcaacggtctctccgctttttgcggaaaaagaaatatctttcagtacagcttcctctccatccgggtaaacgaaatccacatgctcgaagatcacgctgtgttcaccggacccagaatctgtctgagcattcccgggatgattttcaattgaagtttctgtattcaatacggccataattcgctttgcagagatgctggctctcggatacagcataaaaaccatacagaaaagcatgacagaaaacatagcatgaaacagatattccatgaaagccaccagctttccgacctgcagagtctgtgcatcgatcatgtttgctgctgtcagatagatacacaaagcggccagattcatcaaaaggaaaaagaccggttctgtggaagacatcagcttgaacagattttgagactgtttcatgaagtagctgttttcactgtcaaagcgttcggattcgtagccatcattgttaaaagagcgaatcacacggattccggtgagattttcacggaagatgcgattgatacgatccagagaattctgttgtctgtcactgagcggtcccgatatttttcctacgatcacaacgcccaggatgattacagggacggtggatgcaatgattaaagagagattcaaagaggaacggatcgtcagagtgaagctgacaatgatcatgatcggtgttaaaagtgcggtccgtaaaatcacatttaaaaacgtcatgatttgaaatgcatcattgtttgtccgggtgatcaaagaagcgataccaaactgattcatctcattgtgtgagaatgtctgtactttctgaaatacatcttctctgatatcccgtgttacagatgtggaaattttggcacagcagtatccaagcaggatcgttccggatacaccgatcaaagaaatcactacgatcacgattcccatgcggattaaatactgtttgtcctgatgcatgatcccattatcgatcatttcagatacgatcgtcggaatgccaagctctacaagtgcaaatccgaatacggaaataatatttaaaacaaacagcttcttgtatcgcttcaggtagtgaagaataagttgcataagtagattacctcctaaaaaagtatgtctgtttcagtcaccttatctacaataaactatagagtaagacgatggtcaagcagaaaacaaaaaatcataagaaaatatagaaatcgaacatagtttccaaacaaatgtttgatttttgcagtgtgctatgataaaataaactaaataatgagtcggaaagaacttgcaggagggttattatgtcaaaaggaacgattacagataagcagagagagattttagaatatatcaaatcacagatattagaacgcgggtttccgccggcagtacgtgagatttgtgaggcagtgaatctgaagtccacgtcttccgtacattctcatctggagacactggagagaaacgggtatatccacagagatcctacgaagccaagagcgattgagattctggacgatgaatttaatctgctcagaagagaggttgtcaatgtccctctgatcgggcgtgtggctgccggggagccgcttctggcacaggagaatattgagaactacttcccgataccggtagagatgatgccaaataagcagacgtttcttctggaggtaaaaggagaaagcatggtcaatgcaggcattctggatggagatatggttcttgttcaggaagaacatactgcagaaaatggagatatggtggttgcattgattgaggatggtgcgactgtgaagaccttctatcgggaagaaggaatcatccgccttcagccggagaatgattttatggatcccatcatcgtaaaagatgtttccattatcggaaaagtcattggagtatttcgcttcttccggtaggcggatacattattataaaagcgggaatcagacgacgcttacatcagactgattcccgcttttttactgatcttctattctttttacaactcagaaaaatctacatgctttccgtctctccagatacgttccagatcataaaacagacggttttctttgtcgaaaacatggacgatgatctcgccgaaatccatcagcacccagtttccggagccatatccttctctctgtttcatttcatatccggcttttgaaagttcttcttccacgttgtctaccagtgcacgtacctggctttcactgtttccgtttgcaatgataaaataatctgcaaggacggaaacctgagagatatcaattacctggatatcctcgccttttttatcgtccagtgcctgataagcaagacgtgccataagttttgactgttccataatttgttctcctttccggattgtccgatatccctttacagggatattgcggctttatttttataatactgacaggttttttctgtcataggatctacttttcttccggctctttttaagaatgccagagttgattctgctgtcatgcagacagcggtgtcgatgtcatcaaatgcggcagttcgcacttcggccagccccggaatcttttttcttccgggttcgatataatctgccagatagacgattttttcaatcatggtcatggccggacgcccggttgtgtgataggtgatcgcatccaggatctccgaatctgtgatgccgtattcgtattctgcaaaataggcacccaatctggcatggatcagcgcaggaacctccagttcggcatctgacagtttaatgtgatgcttcctgcagagcaggatctgttcattgacgtcgcaatattttccacaatcatgcaaaagaccggcagtcatggctttttggacatccgctccatggcgcatagccatggaagcagcggtgtacatgacgccgagagtgtggatataacgttcttctttcagcttcttttcaagctttttgcggatggcagttaattcagttgtcatgacctctcctcttctcttttggtatataattgcagtttttgaatataatctgcaacagaatccggaaccatatagcggatcgaacgattttgggcagcacgatttcggatcgttgtcgatgaaatctccagaagcggtgcctgtaaaagttcgatctttgcctggtaattcgtttccagatactgaatctgacgctgcatatcaaaagaatctttatcatcccgcattgctgccagaatggtacaggatggaaaaatctctttgaaatatttccattgttcgatggaaaagagagaatccgctccaagaataaagaaatattcattctcaggatacagcgcatgaaattcctgcagagttttatacgtgtaagaatgacagtctttttttgcctcgtgaagggaaagttgaaaatgcgggttttctctcacagcaagccgcaccatttcaacccggtgtgcaagcgcttcttctgtatcttccacttctttgtgaggcggatttccgttgggcagaaaccagacttcatccagatggaactgctcataggcaaattcaccaagcagcagatgtccgatatgaatcgggtcaaaggttccgcccataattccgattctcatagaaatctcctacggaagtacgatttttttcttatcgtcttttccttctttgtacaatacaatttttttgccgatgacctgtacgacctgagaacgggtgcgctcagccaccatttctgccaaagctctcggatcatccgcacagttctgcaatacactgatcttgatcagttcacgtgcatccaaagcctcgctgatcgcctgtgtaaggcttggagtcatgctggattttccaatctgaaagatcggatccatggtcatggcaagactttttaaataggctctctgttttgttgtcatgatattcaatctcctgttaaaatatatgaaatttatttatagtaatcaaactgcaggccgtacattttcacggtatcgccttcctgaatacctgcttcttccaatttgtccagaataccggtttcttttaagaatttctggaagaaagcgaatcccttttcggaatccagattggtgtaaccaagcatcttttcaattttcggaccttctaccacatagacatctttttctttttctactgtgtaaggaagctcttcataaatcagctcgtcctccgggaagaattcctgttcaaatacgatcggaggtgcatccatagtctgaatctgttcacttacatagtagagcagttcttttaagccctgtccggatactccggagattgggaatactttgatgccctgtggctcaaactcctccttcaggcgctgaatcggatcgtcatcttcactgtagatcagatctgttttatttgctgcgatcacctgcgggcgttttgcaatttcaggattgtaggcctgaagttcagcgttgatcttatagatgtcatctaccggatcacgtccttctgttccggctgcgtctacgacatggatcatcatttttgtccgctcaatgtgacgtaaaaattcatgtccaagtccgacaccctcggaagctccttcgatcagtcccgggatatcggcaacgacaaatccctttgctccctccaggtctaccactccaagatttggattcagtgttgtgaagtggtagttggcaatcttcggctgtgcatttgtgactctggaaaggaaggtggattttccgacatttggaaatccgatcaatccgacgtcagcaatgactttcagttccagattgacttccagttccatggcaggctgtccaggctgcgcgtatttcggaacctgcatagtagcagttgcaaaatgctgatttccaagtccgccttttccgccttttaacacgatctgtctgcggttgtctcctgacatatctgcaatgacttttccggtcttggattctttgatcacggtcccttccggaacacgaagaaccagatctttgccgtcctttccgtggcattttctcttgccgccttcttctccatctccggcagcatattttcgtttgtgacggtaatcaaccagtgtgttgagtccttcatctacttcaaaaatcagatcaccgcctcttccgccgtctccgccgtccggacctccgtttggcacgtaaagttcccggcggaagctgcagtgtccgtccccgcctttgccggaacggatgaatattttcgctctgtctgcaaacattgttttttcctcttcaaaaattagaatcaattgttttggcaccaaaatgtgtgtggtgttttacgaaaaagaagcctcagactaagaagtctgaggctttctcacggtaattattcagctaccggatagatagaaacctgttttttgtctcttccttttctttcgaatctgacaacaccgtcaactaatgcgaacaatgtgtcatctcctccgcgtcctacgttcacacctgggtgaatctttgttccgcgctgtctgtaaaggatatttccggcttttacgaactgtccgtcagctctctttgcacctaatctcttagcttcagagtcacgtccgtttcgtgtggaaccaactccttttttatgagcaaaatactgaaggtttaatttcatcatggttgttacacctccttgaaaatgatatcaatgtatggttcatattcgctgtcttcttctatctcctgtaatccaagaaccatagatttgaacagcagcttggcatcatgagaaggttttcggataaaccgaaattcaatcatcccggtctcttcatcagaaacaagagaaatcttatctgatgtaaaacgttcaatcgaattaagtgtgttgatgaccagtacagacactgccgcacagaccacatcacttcctgcttccgaataccctgcatgtccgagtacatccagacctgcatagtcatgatttactgtcttataaacggttaccttgatcatatgacagattaagcgttgattttttcaatcttaactgctgtgtactgctgtctgtgaccatttttcttatggtatccagtttttctcttatacttgtaaacgatcacttttttagcttttccgtcaccgattacagaagctgtaactgttgcacctgctactgtaggctctccaacaactaatttgtcattgcttactgccagcacctggtcaaatgtataagtctctccagcttctacaccaagtttttctactttaatgatatcgccttctgctactttgtactgtttaccacctgttgctataattgcgtacatatggcacctcctattatcattactcgccagcttcggtgtctgaatcagaacttgaaaacctcgctgtgcggcataccatgttagtatagcacgtatattccatataagtcaataggaagcagaaaaatatttcaaacttttctgcttcctgttataatatgcattatttgtcgcattcattcaatttgtcatagcaatattcgatgatactgcgtcttgtgataatgccgatgaatttattctggtcatctacgaccggaacaaaattctggctcattgcccggctgatcagatctttcatatcggaatccgcagccactgcgacataatctgcttttcgctcaaaatcatgaataaagatatgctctgcttctttcagattcagattggtatattttttcatgccccagagcagatcaccttctgtaatcgttccaacatactctccctgacggttcagcatggggattgaagcatatttgtgatgttccattgtctccagaacctgacggagtgtgcagtcatcatagacatatgcaacctcctgttttggatgtaaaaagaacaaaatgttcatcgtgtcacctctgtctttaaatctgtgtttctacaaaaatctggtacagtgcacggatggcgtttttgaagtcatcgtgtcttacaccgacaatgatattcagctcgctggatccctggtcgatcatcttgacattgatatgggcatgggcaagggcggagaaaattcttccggcagtgccgcgtgtggaacgcattcctcttccgacgatggcgatcagagcaagatcagactccagttcaatgtggtccggattcacagctttatggattccggccagtacctgctgttctttctcttcgaactcatctttatgtacaaaaattgtcattgtatcgatgccggaaggcatatgctcgatggaaataccgtttttatcaaactcttccagtaccttgcggcagaatccgatctcggagttcatcattgctttttcaatggtcacggcagcaaatccatctgtcccggcaattccggtaatggtatattttggctgtctgcaggtactctctacgatcagtgtgcccttgtcctgtggagcattggtgttgcggatattgatcgggatgccgactttacggacagggaagatcgcatcctcatgaagtacagttgcccccatataagaaagttcacgaagttcacggtaggtgatcgtctcgatggattttggatttgtaacaatgcgtggatctgcgatcagaaatccggatacatcggtccagttttcatacaggtcagccatagctgcacgggcaaccagagagcctgtgatatcagaaccgccgcgggaaaatgtgacaatggttccgtcttctttcgcaccgtagaatccagggatgacagcaaattcttccccttcaagacgaagagagagcaattcgtttgttttctcgtcatccagactgccgtcttcatgaaagcggatcacttcagctgcatcgataaaacaaaatcccagataatttgccataatgataccatttaaatattctccccgggatgcagcataatctcttccgatttttttgccaaaattttcacggatcatatcgaattcatgatccagtgaaagttccagattaagaccgtcgatgatttcgttatatcttgcatggatctcatccagaaggcttgtgaatttcttttcacggatcgcaagattgtagcagctgtaaagcatatctgtgacctttgtgtcgctggaactgcgttttcccggagcagaaggtactacatagcgtctggacttgtctgcccggatgatatctcctacttttttgaattgttcggcactagcgagagaacttccaccgaattttactactttcttcatcttctttcctccaactatatattatttcaaattagatgcatagatgtttgtaaaacgcacgctctatcatttcgctttcctattatacagggtattttcaggattgtaaatcatagatttaaaaaaaaccgagtgtactccgaaatgttaaaaagtaacatcagcatattgtgcctgtgtcacgttctttaagtcatccggagaaagcttcagctgcattccaagctttccgccgctgacatagatataatccagcgtttgtgcgttctcctgaatggttgtcggaaatgcttttttcataccgatcgcggtacagccgccccgtacatacccggtcacagttgtgatctctctgacagggagcatttccacagacttttctcctactgcccgggctgcttttttcagatccagctctgcttcaatggggatgacaaacacataatgagaaccgctctttccggttgtgaccaaggttttatacacccgttcatgaggcagccccagtgtgtcggctgtactgattccatcggtaaaattgtcacattcataagtctggtattcgtaggaaatcttgctgcggtccaaaatgcgcatggcgtttgtttttaattcttttttactcaacgtgttcacttctttctggtgatttttcggctttgtcacggacgcattcgtgaagcggacgccgtacttttttacgggttacttctactaactggagtgctgtgacatccacaacggacgtctgaatcgggtcttctccaagaaaacgacggaattgttttaacagctcctgcatcatgtccggatcatccatgttgataaagtcaatcaggataattccggaaatattgcgcaggcggatctgccgtgctgtttcctttgccgcttccagattgatctttaaatacgtttccgcacttttcttttttgtcttcgcagaatattttccggaattgacatctaccacggtcagtgcttctgtcggctgaatgacaagataagcgccgtttttcagccagacgtattctttgagtgcgcgttccacggcaatgtcggtactgtaaagtttggaaagcggcagaagctgttcctcataaaactgaagtttggagagatcttccggctgctctgcctgcaaaaatccgtgaatctgctgatacagcctgggatcatcggtaatgattgctgacaatccgtctgcgtatacatttttcaaatctgtaatataagacggaggggcctcctgcagacaggaaaagcaagtccgaaacggagcagtttcttttaacttgacacaggcattctccagtttctgaatctcctcaagtaccgtttcaaagggaacgtcctttgcattcgtacgaatgatcagcccgtagtcctcatttttgagataactcagtttttctttgtacgtatcccgaagagaacggggaagcttcccggaagtaccgatcctggtatttccggttgtcagtactgcataccgcccggtaaaattgatattgctgctgacagtcggcgcttttgtcttgactgcttcccggctgatctgaacgaccagctcgtctccgatacaaagcggtttttttccgattttatgggtaaagatcgcctgaggcgcctgacttaggtcgtagtagcactcttttcccggagcaatctcgataaaagcggctcctatattcgcggcgatattttttacttttccgatgtaaatatctccgagtacaggttgtctgtgctgatcagagtccggaagactgcagtggatctctacgattacatcatcttcaagaagaaaggtccagatcttctcctcttttttcagcattaaaatttttcgtactgccatttgtatgatacctctcttttttgtactgtctgaacacagcaggatttattcgattactgtgccgagagattctaaggttaccagatttcgtgcgttctcatccccggaatcagcatacatttccagacggcacagtgcaaattttaactgtgtggcatctgcatctaaaaaccggcagaatgcttccatgacaagtcccggttttaaattctccacacttccggcagcgagctgcataaaaagcttgtgatcctgcacttccatccggtagatcaaaggtttgatgtccacttctttttcgctgcgttttgtctgttttaagatgcggatctcagactgcgagagaaaggcatccacctgtgtttcccagtcatccggcagtgtttccggcacaagatccagaagatagtctgctgccgcgacaatcgccattccggtcatcttctttttctctgcgatctggcggaagcttaaaacttcgattccctctaccataacggcatttaaacgggacaccgcttcagcactggaaatggactctttcagttcaatatcaaaatattcgccctcgcttgtaatcccgattcccagcggatttgcaaaggacataatcatatgaggactgtagcctccggtataagcgatcggaatgtgtgctctgcggattgccttctggaagaagcgcataacatccagatgtccgataaagcgcagtgcaccgtattttttaaatttaattcttgccttcaaaacagacacctcctccaaattttgccgcaccacatccggaacactgcattctgcagtttggagtaatatgtgcgttcattgccctctcccattcttttttcaggaagtttttggtcacgccgatatcgatgaaatcccatgggaaaagctcatccatggagcgttcccgcatggtgtaaaactcaatatccactccggtatttgcaaatgcctgcatccatttttcattgtcaaagctttcgctccaggaatcatacagacatcccagacggtatgcttcttcaatcacttttccgaccttgcggtccccgcgggcaaatacaccctccagcaccgtgacatctgcctcgtgccagttatatttcaaactctttttgttcaactgctgtaagaattcatgctttacaatcgttgcacggcgaatgtattcttcacttggaaacatctgtgcccactggaacggggtgaacggttttggaatgaagaacgaagaactggccgtgatctgacattttccgttgcgctgctctttcggaatctcataatatcttcttgcaaccttttctgccagatgggcgatggccttcatatcttcttctgtttctgtcggcagtcccagcataaagtacagttttaccttgttccatccgccttcaaaggcctgtccggctccttctaaaataatttcttcggtcagtcctttgttgatcacatcacgcattctctgggagccggcttcgggagcaaaggtaaggctgctttttttgatatcctgtactttactcataacatccagagagaacgcgtcaattctgagcgacggaagggaaatattgattccctctcctttaaattcatcgatcaggaaggtgacgagctcttttaattcggaataatcactggagcttaaggagcttaaagaaatctcttcgtgtccggtgttttccagcatcgctttggcgtattgcttcaagcgctccacattgcgctctctggttggacgatacagcatacctgcctgacagaaacggcatccgcggatacatcctctctgaatttccaaaacgacacgatcctgtgttgctttgatgaaaggaacgactggagcctgtggatacggtgcttcggttacatccagtaccatttgttttttgatcacagacggtgcatgttcgttgttcggtgtaaaggaagcaagcgttccgtcttcatggtatgcggcatcgtaaaacatcggcacatacaatccttcgatctgtgcggcacgctccaaaaattccagacggctctttcctgctgcccgatactctttataggcatccagcagttcgtcgtagacagtctccccttctccgatatagaaaatatcaaaaaattccgccagcggttccggattatacgtacatggacctcctccgataacgattggatctgtctcaccacggtcacggctgtggatcggaatccggcttaaatccagaatctgcagaatgttggtgtagcacatttcgtactggatcgtgattccaagaaaatcaaaatcacggattggatcctgggattccagtgcaaagagcggaatctgttcttctttcatgatcttgtgcagatccagccacggagaataaacccgttcacaccagacatcttctctttggttgaacatatcatataaaatctggattccgagatgtgacattccaatctcatagacgtccggaaagcacatagcgaaacggatatccacctcatttttgtttttcatcaccgagtttacttcgtttccgatataccgggccggcttctcgatttttagtaatatttcatcatttaaagctagttttctcatatttctcctttcgtttttgtttaatatatacaaaaaagtaatcttcttttctttttcgattttcacgaaaaatagctgtttttttatgattttcagggacgcttttcagtatgaaaaatgctgattttcacctgatttttgcccttgcgtaacaaatttactttttttctactgtgcagcactatgcataattatacaccattttcatggtcttgcataaaatacatagcactgcataacataatttgatactataaatcacttattttgtaattaaattctcaaaaattttgtcctgctttttctatcatttaacaccctatatgagaatatgatattatttgatatgaagcagcagaaaacattctgaaacagcatgttaacccaccgtattatatactttttgcggaaggagttcaagcaaatctttctcagatatctgaatgtcgaatacaaaatctgtttgaggcagaatatctattataaaattgccaatcaccttctcacagtcatatatttcttcaggaagattgatataaacatcctttgtaacccctgttccattatgtcccatacagacagatatcgctttcaaactaatatcatttttctttaaaacagttgcgtatgtatgcctcaaatcatgccatcgcattttgggcaaattgcaatctgccaacagttctttaaaagatttccccaaactacccctgttatagggcaaaccgttttctctaaaacatacaaagtccagatcctgaaattggggattggatttctgcactgtttcatacttatggcgtgccacaatcaattcatctataacaaaatcgcctaaaggaatatcacgttctcctgaatgagattttgttttcacctcttgtgtacataatcggttgtctgcctcaccatcatttgaagttgttctccctaactgtcgtctgacatgtaattccccttcccaccaatcaatatccgagaatttgattgcaatcacttcagatattcgaagaccggttgttaacgtcaaaagtaatggtatatacatttctgttctggtttctttacattttaacagcaataatgaaatttgcggaatggaaagaatgggatactcctttttttgatgttttatagtgccttctcttaacgcttgattataagcttttttcacagccttttttttcatacgaattgcagttagagcaggatttattcgtatcatctgatggttttttgcgtatgtaaaagcacctttcaaaacagtataggataaacgcaaaacactcactttttcaatagaatccagcccttttttaatatcgttacgctcgatatctgtaattttgctgtttggatcccatgtttttaaaaagtaattgtagattacattgcgataactacaaaatgtatgataggatatctttctttcatcaatcatgtaataatatagccagtagtcaaaaaattcctttagcgtgtattcaaaaggaataaacctttttgaatgcaactcagcaatcgcaaattcctttgctttcagcgcttctgttttcgtactatatccacctttttgcataggaattacaattccagtggaaaacgtcagagaaaaacggtatgcaaattttcctcttacaggagtaattgtatctctaaatttccatgaaacaatatcaccatattgaaaactttctttaacatcaggttttataattggctttttattcatgtgtacactctcccgcagcagatttggaagcggcattaattggatcaaatgaggaatcaatcaatgctgaaattttccctttcgcttcaataatgccacaataaatttcaaaggttgttgcaatgcttttatgccccattattttagaaatttcttccaactgcattccttgctcaattaaaattgttgcaaatatatgacgcaaatcatgcataccgattttgggaagtgagtttctttcacacatacgctctaaagcagcgttacaggtagtttctccttttatatttccttttggtccaatacagataaaatctttccattttggttcagcttctccaagtttttcaaacaactgcatattttccttttttcgaatttctaattcttgaaaaataatgttatggatacgcagtgtccgataactacataatgattttggcggttttacagattgctttgaagataataccttataagataaattcccttttacaacaatttcatagtctctcgtaacctgccgttctactttaaccgtttgattttccgaattaaaatccgaatattttaaccctaaaatttcacccttgcgtaaacctacaaacaaagccagtaaaatctctaaataaacagaatggtattcatacgccgcttgaagcaatgtccgtatctgctttttagaatatacaaccattgcaggaacgtcccaataatactttttcatatctagcaacggattggtctcaagatagccatcatcaagagcatctttcaaggctacattaaatactttgtttatcattcgccctgcacttttacaatagtctttacaattctctaaaatttcatttagataatcggaagataccatgcctattaaaatatccttcggtgtatttggaataatgattttataaatcgtccatgaataccccacttttatagaactgtctgcattaggaagaaaaattttttgacaccagtaatctaaatattcaaagaacgtatatctcatatttgttaaacttttaattcgtttcatctgtttttgatatcgttcattttcttgctcttgtgcctgctttgcctcttcgacagagcaaaatcctgtttttttctcatattctattgtataggtattacagttaactgtctttgtcagaaaactccatgtgccattttcataaaatacagctcctttattagtcattgatttttccatataaagtacctcctatttggtaggtgcttatatgctttcttttgccataaagcaccgtaacataattgatttgtgtgtgtcaatacctgcatctatgtttgtaaacatggtttagtttccttcatctaaccaatggtcgaatgaagactttggaatacgataaatatttccaatttttataactttgaatggtttttgttttacatacacctcttgtataaaagcataggcttttgtacgtccaatatttaagatttcctgaatatcttctacttcgtatacacgtttttcttctgaatgtgtacctatatgctcacctcctaagcttctcatttaatttaattttctgattttagttacttgtaaataattggattttattttagatacatttagacgacatgaattctttctgtaagatttgtaatctgaattgaatttattaaaacctaaaaatagttaaataaccctttctctgttcccgcttttaagagtttacaaatagtaaaataacgattctaacggattttctgctcaccccattgaatttgaagttttccttcctgatctacaccagttgtcattaaaagagaaaatatctgagggttgataccgaatttttcatataattctccgctcgctatcaattgatttttcatgaacaaattaattttctcctttgccaatatcatttttagcagattcacttcaatagaattttcgtaaatcaaaaataccacttgtttaaaattctgagatgtataacgaataaaccgaaaataatattgttccatagctgcatggttatagtgaagttccggcaaaataattttatccacatcatcaatattcatggactctgataagctttgctgtgtagaaagcaaaattccattctctgtctttctcagttcttccacaatccgctgccgctgtttacaaggatttttctttcctgtgatcataaaaattggtcttttcggaaatgcctgttttaaatagtggtaataggactccgctacttctatcttgcgaactccaatggcaactctttctttttcccacatctgcaaaagatggattgcttttttaacttttgtaggcggttcattactgttatattcgtatgcaagagaggaatctgcacatattttcagaagcaacatcaattgttgtaaaatccgaaacatagcatcttttcttgcgtttttacaagccataaagtatttcctgcggattttatcaaattcttttatggcagtcagatagacttccttttctgtctgattaaaagagcaagttccttgataaattttataaatttttctaccaactacttcctcaaaattttttgttattacggttttttctaataattcatctaaaaatgaggaattataaatgtcttggtttgccttttcaaggccaaacaccgtaatcttctttggcaaataagagaaagaaaatagttcatatccctttttataggcaggaaatggttgattaaaaaaagggttcgcatatttttccatctgtccattcctgaatcggaaaatccactcattttttgccagataatgaatcgaattattataaagcagctctaattgtggagcagcttctacaacattgtttcgcgtcattgttccagtcgccagcactttatatctgcactttcggaagacagaaagcattgcttttgtcctcttggaacttccattgctgattgtatcgctttcatcgaaaatcaacatgaccttctgacaacggatacggaccagttttttcatctctctttttaagtctgtcagtaagttgactgtcaaaagtacaatctgccctttctgcacccttttgatatcttctctttttcggatacggtaaaaatcaatctgatagtctgtcagtatttcttcccatgtattattgattgccagagctgtgctaacaataaacacattccgaacagggctatattttattctgtactgtgccatcgccagcgtacaaaggctttttccggttcccatagaaaactgtagggcggcatatcgtttctgcaacagtttattcacttcttgtttctgtataggatttagatatttgacttctcctgtcatctggctttttacatgccacttttccagatattctgcaattttctgatcctgttttatttttttaaatggtatttcctgtagttcaaagttctgtcgtttctttttcaaaaatttttcaaatcctggaacttccgcttttgttaaaacaaacgaatggatagaacctaactctacatcacttccattttcgcgataatcctttactttaaatctataatttgtctttacaatccgagtttcattcctgtaagtcttattcgcagaagataaaatttcctttaatttccgtaaaacatcttccggctgtatcttgattttttcccactcctgccaggatagttcctctggttttgtttgtttcaggtactcttgcaaaatttcctctgcctgtcccgctttatgagtaatctttcgatttcttttgatatcaaacaacagtttcactgttttttcttgaaatgcctgtttctgctttccctctaagtctgtattctggcattcaaaataaatatttgcagcattttttctccgttcctgaagaaccggtaacacataagtttgataaatttcttggggatgtttcagaacctccttctttgtggtgtaaggtctttctgttacatattgactctttttctgtaagatcatggcttttgtccgaaaagatgtcacaccatactctttgaatacatctgctggcaaagaaaattgtacaatcaaattaaacatctgattgatttcttcaatatcccctttatttgaaaaatcatctgaaaggaaactttccggaaccagcaaaaccaaaaggcctccgtttttcagtacctgatatgcttttttgcaataatacatttgggaagataccggtgcttcttttgttccccattccaaatgaaaaggcggatttccaaatacaatatctccgcttaaaacaggggaatactgccggatatcgccatattgcagatttgcctttgggtagaggtactgggcaatcttcactgctttcatatcaagttctgtcccatagatattactttctgtagggagataattaaaaaaatctccttttccataagtcaaatcataaataatatcctctgcttccggtttgacacaggaaacaagaaattcacatacttccgctggtgtgaaaaattgtccctgctcgatttcttttttcgcttctgtataagcatgaaaattttgaaagtccttcctgtccagtccatgtagcccaccatttcccgtgtatacattaaaaatatcctctggtgtgatcccatatagttctgcttcatggttttccactagatacaagattttttcattcaatttttgcctttgctctattggtatttgaagttccgtatcttttttgtatttttccattagattacctccttatagcctaggtactcttttgcaaaagacaatgcatgtacgccgctgtcaaaaacgatatcccatctaccatttttaaaatacttaaatttgacaactttcttaccaagtgcgaggtgctcatcaaaaatcccttctttttcttttttcccgatgtatgaaaaacttacaaatctttccagccacccatcataaatgttaaactgtttttttccagagtcaaaaaatgtcaatgcacgtaaaacggccttatatttttcattatccagacaaatttcatattctccccaaagatctgttttgctgtagaccagatttttgatggtcagttttttgctttgtatattatattttacgtaggataatcctgcttccacattttctttaatctcctgttccaccttttcttgaaaactaaaaccaccaagataagaaaaaatatcatctacaataagcggataatcaattctggcaaataaaacttcataaagatttttttctttctgtttacggcacctcttcatttcttcccgataaatttgtttctcttcttctgttaaagaagaaatccggttatgtaatacgggttctgctgaattttgcagggaaatatagcgttcatacgaatgtatctgtatagcaagaccatatttccgattaaagaaagaaatgattgttttaataaaatgattatgtaccttttccataacttctgtttgtttcttcttatccatgctaattaagttctgttggtacaccctatctgcatatttcttcatcctcccataaaaggtcagttcctgttgatgcagagtttccatatctacaaacatactcaaaaaatgatttctggtactgtcatataatttttgctgtatctcacaaaatttttgatcttccatagaaagtctagtgtactgtattgttgacatttaactaaatatttatagctattatagccgcttcatgttaaaataaaagaaaacggcggtgatttatatggcaagaccaagaaaatatgtcattaaacttacagatgatgaattgaagacattaaaatctataattcgcaaaagtaatacatctaaaactattcgaagcagatgccagattattattgatttggatgaggctcatgggaaagtattaacccatgagcaatccgcaagatcaaatggtgtttgcctgacaactgtaacgaatacagtgaccaaatatttttccggtggcattgaagcggttaccgagttcaaaagaaatatcaattccgacaatgcaaggcgtatccttgatggacgtgcagaagcacgtattattgaacttgcctgcggtcctgttccagaaggtcattccagatggactttgcgtctgctggaaaaagaagccaaagtagtgcttgatacaccggttagcaaagatgctatccgtagagccttaaaaaaaacaaacttcgacctcacaaaaatgaatactggtgcattccctcaagagaggacgcagaatttatagcttgtatggaggatgttctcgatgtatacgaacttccatataacccacaacgccccgttgtttgtatggacgaaaaaccatatcagttacttggcgaggcaagatccccacttcctatgcgccccggcaatgaccagaaagtagattctgagtatgtcagaaatggtacatgcagcatctttgcattcgtagaaccgcttggtggagctcatcatgtaagtgttcgggaacatcggactgcaattgactgggcagaagaaatcaaatatcttgccgatgtcatgtatccagatgtagaaaaaataattcttgtaatggataatcttaatacacataaaccagcatcattgtacaaacgttaccctgctgatgaagccagaagaatcatgaaacggttggagattcactacacaccaaaacatggcagctggcttgatattgcagaaatcgaacttaacgtcatgaccagacaatgtttgaacagaaggattgataatatttcaaatcttcgtaaggaattatcagcatgggaagttgaacgaaataccgtagccgcaaaggtaaactggcaatttcgaacggaggatgcaagaattaaattgaattccttgtatccgacatttactactgcatctgaataagatgcagtagtaatgttaaatatcaacgatacagcacactagtgttattttggattttgacacgttgcagtttttttaatacatcattcataattctgctcctttctttataagaaaaggcagaagaatattctaatccctctgcctgtgttgctattatcttaaaattcccatgttcctacgcagcctttttctcttcttctccctttagaaaccttaatttttcttctgcatagcaaacaaattctaccatttcctgcggataatggatccgccctttcccctgacattgcacaatcttccctcctctccagtcaacagtaaaaaaaggagtatccggatctgtttttttccggataaaatacacatcacatttccgattggcaatatgtgggatatagcttcctacacaatgtcctaacgtctctccttctttttggatttcctgataattctcaggaacttttaagagatagtctttatcctgaatttgtgtatccagtaattttatatctttctttaaaagtttgttcactgttcgcctttcttttgcctgtttttttctttctattttattttctagtttttgatactcctgaaaagtcttgtcgtgaacatctttgaaattttttggaaacagaatgtatcggcttttcagatcatattccaatttttctgcccatccaatataatctttccagcttcttatatatgtctgatagtatttcatttcagcactactgataccagatacatcactggacagtttatatgcctttcctttcacatcttttgaaatctgttttcccaaataattcacaatttttcgaatagatgcatactgatgtaattccaaaaaatctttattactctcaaagattttacaatacccaagaatctcctgttcagacaaatggatgtttcgtttctccatttttttcaaaacttccaattcctttgctcccatattatacttgatcataatagaacaaaaacgtgaatttattcctaatagatgcctgatatttgtttcttttgtttctttccactcacttggaaggtgatataaacattccaaagcaaaataaaacatattctgcttcaccaattgttcaagcaatgggaattttaaatatgtcttcaaataatatacaactgggaattctacagaacgattatgtttaacaaaataatctaaagagcaatactcaaatggagtccctttaaaaatatttttcaaattatatggatacaccattccgggcatttgagttatcgtctgtgttgttgacctcataaattatcaaaatactgatttacttgcctgtctctgaattgacctgtatactgtcatcagcatacaaaaaggaaaaggtctcagagcaccctcctagcaagttgtgtactctgagaccctggtcactaaaccatggttattatatcagattattcacttgtcctcaaggaggattttggtgttttttgttgagagcagtgtgaccacccatatgtgccccatctgtcaggctacgcttcgttaccgggattcacgcccacgcatccgtagaaaggaaggcggtttaaaagatcagttgatcattcggcggttttattgtaagaactgccactcttatcataatgaacttccggattgtcttgttccgtacaagcattacgaaacagaagtgatctccggggtgctggatggcgttgtacagccggaagacttagattctgaagactacccgtcctgcgctaccatgctccgctggctgcaatggttctgcgaaaatcttgaacgtatcaacggatatttaaggacgatcagggagttcctgctgggttataacgaagagaggatttcccttggttcactgctcgattctttcagaaaccaatatcaaaactggttagaaatcatcttgcgtcagatttacaacagcgggggatttttagtcccgatctgctggtaaggcttatgcacctactttgcatcgtctgtcgcggtaccaacgggtatagtggtctcaaaaggaggtcactattttatgaatacaagaataaacaaacaacaatggcaggaagaagaagccctcaggcgtttccaattgatttctccgcttctccaggctgatctggatgatgcaaaacggatccagctgcgcaaaaagattgcagaggagaatcatatatcggtccgttccctttaccgttatgaaaaagcgttttcggaaaggcagtttacagggctaaagccggctgaccgggagaaacaccgctcacaaaaactccctgaaaactttgagtttctgttggagcaggcaatccagctacgcaaggaggttcccgagcggtcggttgcccagatcatctacatcctggaaacggaagggcttgcagcacccggtgctttaaagcgttctactttggaacgccatatctacaaggccggttacggccaaaagcagatgcagatgtaccaggatgcaaggaacagttcttccaaacgtttctgcaaaccacaccgcatgatgctgatccaggcggatatcaagtatggtcccaagcttccgattggaagaaatggagccaaggtacagacttacctgtcctcggcaatcgatgaccactccagataccttttatcttcccggttctatgataatcaggaagaagcaatcattgaagatacgttccatcaggcggtttcccggtatggaaccttcgatgcctgttactttgataatgggacacagtatatcgcaaaacagatccggtcttcccttgcaaggttgggcatccgtgtgatgtatgcaaaaccaagatccggtaaaagcaaagggaagatcgagaagttccatcaggtagtagatgcttttatccgggaatcaaagctgaaaaacatcaaaacactggaggaactgaaccgcctatgggccatctatctggatgagtattaccacaagaaaaagcatgatggcatcgcagaatactatgaaagccttggcgctgccgttccggaagaagggatctcaccgcttcaggaatggaaccgggacagccgcccactgacttttttggatacagccgttgtagccgaagctttcctgcatcatgagcagaggaaagtggataaaggtgcctgtatcagtttccgcgggcaaaggtatgaaaccaagccggccttgatcgggtatacggtagaaatctcctatgatccggcaaatcctgagatcatcaccatttctcatcccggatttgaaccttttcaggcaatgcctgtaaagattggggcgtattgcgatagacacgctacgctcccagctgctatgcaggaacaaaaaccgacaacttcccgttttctggatgctttggaaacgaagcatacccagagcaggcgccaaatggcagatgcgatttcatttgcttcctacaggaaggaggtgaatggctaatgtatgaatcattctttggcatggaacataccccctttgtccgggacgtccctcccgaaaaactgtttgaatccaatgctttccgggaaactctcggtcgtctggcttatgtggcggaccgccagatgtttgctgttgtaacagctgattcagggtgtggaaagtcaacgcttatccgccggttttattcggaacttccaaaagaggattacatcatcctttatctgtcagactcaaaactgaccccaaggtggttctataaaggtttgctggatcagttggggctggaatcccgtttctaccgcggtgattcaaagcgtcagctgcaacaggagatcgaggtaatccggggcgtacagcgtaaaaaagttgtctgcatcctggatgaagcccacctgttagagaaggagacgctggaagaattccgctttttgctcaattaccggtttgattccatgagtcccatggcgcttgttttagttgggcagacagaactgtgggaaaataaactaaagctacagcggtatgccgccatccggcagcgcattgacatgtactgtacgctgcctcatcttgaccgttctgaaacagaacaatatatcgcaagccacatggattactccggatgcgggcaggaaatatttacaaccaaggcattggatgagatccataaggcatctgcaggaatcccacggatgatcaaccgtgtctgtgaaaaagctttgatgtatgcgtttcaaaatcagaaacgattgatcgatgattatatgatcaagttcgttgtggaacacgagatgcttgggatggtaacttcataaagcaggtaccgcctggaaacaggcggtattgcctaactgactggtgacagaaagttaagcaagtgagcgtcaactgatgtgagcaatctggtgacagctcatgaaatcactaacagtctgatagacctttatggtataattcatatggtatttataatagaaataaggatctatatatttctctttccatacatatttatgaacaagacagctatacaccgggtaataaaagcgaaatttctcgtgaaatacagcccgatagtcttcttgatgagataatgtatattttcccataccatgtgcagcataagattttcttacttcaaaatggcgtaatatgattccatctgatgctttttcaattttaacagcttctgcctgatcaacaaaatatcctgcctttccgtttgctttaaaaattgatttccgtttgcaaataggacatatgtattctttgttatgccttggtatggatttctccaattgatactcagatttacagtgactacatgtgcaatctatcattttttttctagaatactgatagaaaatgtactgactttcttttagtacctcatgttccagccatttttcaaattttctagtcactggtttcacactgcgaaatagatactctatatcttttgtcattcttttttttctttctaatgccttttcttcttttattttatactgttctatttctatcaactctatgctgtctactgcatcatctgcgcgatgaaaaaattgtttaatactctttttttccttacatgttcgtatcgcaatctgagatataaagtttccctttttagcttccaatatatccaacggttttacagaccaacggttttctcttataaaatatgtaataaagtctccactgaaaaagaaaatgcgacagaacggaaggtattgctcctttttgatgtcttcagcatcataaagatttagaattaaagtccgtttatgctctaccgtagccttttgtactttcagcagatagttttgtctgcaaagttccatatattgcttatccttaataccggcttctacaaccggtatctttttaagtaatgctttcttcattttccttctctccatcattataaaattcatcatctccagagccttttttcataggaattgcttccaaaaaacaggcaggtatcttaaaatgctctgcaattttctgcagttctttttcacattcttcttctgcacaagccatctgacataagtaagcagaaacctctgcatttttccagtatctttcaaactcgcaggactgaaaaatatctatatcgtctaagctcaaaatttcctgttccgtcatatcttctgggcagaatatctctgcatcacgtatatagatgctttttaccgtaataatataattttctcttttcatcctttactattccttccttctttcttttacaagttccgttttgctgcatcaagaaacgcttttgcagaatcgcgtatcgcctcttttagtgccaattcatattccatacgatagtcctcataatatttctggaataaagagatacatctttccctatagtcttcatttgctttcaatttgctatataccttttggggaagatagtcttccatattatccaggacgttctcctttaagtacaaatatttttgttcttcatacgcctgaaataattcccattctgtcagcagaattttctgcccgtttcgaacaatttccatacccttttattcaccctcttttctcactttatgctgcggtactaaggttgaccggaaggactaggtacacataactgtctttttcatctcttacagtacatggggttttcgcacttgtaaaatacataaagacttcctcatcatcaatcacccgtagcatctctaataaaaatttcggattaaacccaattcgtaatttttctccctcttttacaatgaacatactttcattcatagatcccatgtttgaggctacttctaacgataaaatgttttcttcaatatttagaatgatcggctttttcgtatcgtccttcaacaataaacctgctctgtcaatacattcctgtaattcttttttctgcacttttatttttgttccataatcctttgataacaattgttccacttttaaatattctccctcaatcaaccgggagattgctcttgtattttcaatctcaaactgaatatggttctctgtaaaataaactgcaacttccttttctggatccccgccaataatcttaatcatttctgcaaggttttttcctggaacaatgaccttttgtggttcgtattcctttttcagtttgacttttctgagtgaaatacggtgtccgtccaatgcaacaattttcaactcctttccattaatttcccacaattctcctgtcattgccttcttagaggaagtatctgctactgaaaaaatcgtttgtctgattgcttcttttaactcaaactctgagatcataacacgatttttccattccacatctggtatacaggtatactctaatgctgattttactgaaagattatacttcgtttttttacagcgcacagtcgcttgatctttttctccagtctctatgacgacatctccctctggaagctttcgtacaatctcgccaaatacttttgcctgaattgcaatgcttccctcttcttcaacatttcctgacatcaccgtttcaattcctaattccaaattgtttccggtgagggtaatttcttccttttccgctcgaagcaggatacactccaaaatagaggtagatgattttatcggaactgcctttgatactgtctgaactgcttttgctaaatctgtctttttacaaataatcttcataaattctcccttcatacaactgtaatatttgcttctaaaaacttaattttcctcctttccgttttgcgtacaaaaaaagacacaaaaaaccatacgatttttcatgtctctctttatatttcttaggatgttcctcaaaatgctacttttggcttctgccaaaatgaaatactaactacaaattttccatttgtaaaaatatattcaacatcataatagcacaatatatagtattttacaatctgttttttctatatattgcatgcgcgatgctttcttagtttttataatatttcttttcgtcccatgttccaaagaaactcttgaagtgtatccagttctttttctacacatagaatatttttattccgatataggtaaatcatcggtttaatcacgtctataataaaatcctgattgataagatattctccggaaatcttcaaaaaagcgggcttcttttgtattgtttccaatgctttttctgtcagtatataacctgattttttctcgcctctttcagtataaatgtctccggttcttaaatcaatatacactacttcggataaacacatagcccatgcagaatccatgttctgatcaaacaagaaaatcgttttctttgaaaaatattttccgaaaaaatgctgatagatatttaaactttctacctgttctttttccgtcaaataatgtgacgccttatattcatagccataaaaagcccggtttatggatgttccaaaaaagtagagagaagtttcttgtccggtttctctgatatatttggcggttgtcaatccgcaattatctatcgtatcttccaaaaacacaatgtccataaggcttcgttcatttgctttgtgaaaagcctctatcgtagaatattcatagattgcagatatgttatctgactgatatgcttcttttcggattttctttcggatatcctccagaagcttagtttctttctggtaaactattgcaatttttatcattggtcttccctcccttttttcttttagcatatcatgtcccagtaaaactacaaggttctttgtataaattgccttttttattgcgtaattagccgttaatcgtatctttttaggggcatgtcaccgacataccccaacgatcattaagtagtttctatggtataaatgtgaaaaagttttcttccacattcacacgacagactctgtcattttctagttcacgatacaatacagaaaatacttccacgacttcctgaatgctcaatccttgaatttctatgttttgaaaaagttctcccaaacacaaatcatgttctttatatgcttgtttcacaagcttacaggcatcttctatcgtctttaccgaaatacaagtttctgtcactatatgctcagcctttctttctactgcctgctctgttttaggactttttagtaaaatccccattttcagcatgtcctgtttccaaccctgataggacggatattcctgtttatcaacatatttgcgaaacagtctgtatacccctctctctgtatatgttccttccaggttctcctcataacagccatactggtttttccctcgacccttttttaatttctggaaatccttatcccgcatattctttgttactatttgatattctttttccatgtttctccttttcttctaagcggctgttctctgttctgcttccaacacatctgtcagatactgcccctgatgttttccaccttttatcaccacatgatccttataagcagcagaaagttctgcagtccacagcgtaacctgtggtttttcaggagctttttcttgtttttctatttttttcaatacgttctttttccatttctttaaaaatatttctgcctcttcataatcctctcccgttctgttatattccttacttttttgtacaacatttccatttggttcaatttccatggtataaaattctttctcaagattttcctgtctgcgtaagaaaacaatataagaggcttttctgctgatccgatcaaaataccattcctgtgttcctacacaatggtgtaatgcttctccttcttttatgatatcttcgatcttctgaggaaccagtactgcgtatttctcatcttttaggaattgatagataggtgtgatttctttacaaatcttttccaaatttggaaatttctctcgcagttctgccgctctcttctttgtgtctacttcctgtagagattttactgcctcatcatgccttctttctaacgccctcggtctataaatgatagaatcctctagattttttcctaatttctttaccatggataaataatctctccatatcgttaaaaccttttctgcagatagtccactttccttttccattcttcttaaataatgataaatctgctgtggtgacatttgcttttcaataaaggtaacatccgttgtggaaatattatgtgtttcaaaatactgaagtatattttctggaatccatttttgtgtatccttcattttttgtagccaggataagctagatcttcctccatccactttcaccaactgctttagtaggcaactgtttatccccaagatttctaccagttttttgtaatttggaagctggctctttctttgaatgctttgaactacaatttttttcaaccccgcctttgcaactttctcgatggcagggcagttataacggtataacaaatatgtttccggctctaccatcctcatgtttttttgaaattcgtatagccctgatttcttcaaaataccttgatttagggaaaataaggttctctgatatatcgtgcctttatttccctcaaaatcatagtggtaatacgcatacaaagattctctccatcgataggagtcatctttatattttccgtaataatatgctgtttgagaaaaatcttcttccacgattacccttctggtttcaagccagcttatttccggaatgaaaccattattctgatggaaatttgcataaacagcaaactttctgattaccatttgatcaactccgaacttctgtagcaaataagtatgctctgctttgggaataatccttttttgcattttcatggatttatattgtattcgctgtctacacttcgggcagataccatattgattatgctttggtgaaatcccctgcaccctagtattacatctgctgcagtatccttctccttttctttccggtttatagaaaatatagtgttgtgtaatgaccgactttctgcaccacctttcccaatcctttggaagggctggaatttgggacattacctgatcccattcatcagtttcttgtctgcgtctttcctctatcttatcccataaaatatccgtttgaaactcttgtataatacttctgatagcactaactttcaaaggtgtccatctgctacattctttgtcaaaatatttccggaataatgcccaatcccttttggtacagtgataaaagctccaataagaataaccaataatattcataatcgtggctgttctccatttcgcttctcttggaatataagaaaggtaagtacactcttttttatttaagaatacaacgagttctggctgtatctgtttatcaagcatttcttttaccctaaaaaatgaaactgctaaaatttctccctttttacaaatcctaacatatacttcacggtcaaactgttgcattttcttttgcaccctctgtttccggtatcttttttcttcttttttcgcaaactttagcattttccttgatgcctgcaagcagccgattgtcaataattcttttttcctcatctatccttctacctttcttccatcaaaatcataataaacatttgggatatattcttttccgtcaatcatgattactgaaaaatcagtgatatttcctgtgtagtcttccctaataaaaaggaggattgtatcgtcacttccttttccgatgggatgtttcccacgtactactgtgaatccccccatgggactacctttttctatctgtacaattttgctcaaccttctttgcggatagtggagcatataggcaaccccttctactaaaagctccaataacgtcagtcttctgacaatccgaagctgtgtgcaggcgattttactgtcatctccttcttcctgacgttctcctgcgacctcaaccacacaatattgtgccaaggacggattactatagtaaatcagacagtccaaaggattttcagcacaatgaaagcccgtttttctgcaggcggctttttccgtataattccattctgtttcctgatattgatatcccaaacaactcaaatctttctggaatgctttatacgcaatcattttcttcctccgttttttctccattttccagcatatcaaaaagagagagttgactgtctgcttttggcttgctttctctgatagaagtctttacatcttttacagcaggtttttcttgtgcttttctttttcgttcccgttcttcctctttctttttccgttcttcctcagcatcatctaatgcatagtattcctccaaccaatggtacactttttctgaactaactgcgactcctgcaccattttgtccatttcgattctgttgcaagtagtcttttgactcttcatatactctttgcagaatgaaattgattcctttttccaaagatttatgaggcagcagtatctgtgcactaaggatttcattttcgcagcgttccaagagatactgccctaaagccactgccagccctggtccttcaaactgatacatttcttccgcaatcttttcagaagcagtagaaaatttcttttcttccaacggcacttctgccagccgaagtctttttccctgcaaaaaatcctgcatatcattttctggtatcagcctttctctgcaaagttcctgcaaacgtgaaatttcacctcttgctcttaaacggtctgcaaccatattcaaatctttcgtattttctatcattgtctcaagcattcttatttcctcctataaaatcaggaaggggttacccccttcccgttatgctgctctttttaattcctctcttttttctctgatttccttgtcctcttcctcaataatactaatcatttgaatcaggaattgcttacaccaagtatttccttcatacttctttcctatcttacctgcttcttcaatgatctgttcccattcgctgtccgctctttgtccttttcctctatgtttcttatagaaatcataaatttcatgcattgccttatgcatatcaatttctactgtagtttccaaattagaaatcaaggtaataataaatttatggttatgatatttctttaaaagtccctgaattcccaacatggattttccaagatatacgccataaaagtcacctaccatacttgcaatcattttttgatctgtcaccctgtttcctcctttcaattaacaaataaattcttctaatgtcatctgatttttccaactggaccgtttcttattttcgtcgctttctacactagtacttgttttgggaagttcttttattttttctataaatgagcaaatttgaaaaattgcacaaaactacactgcgaatttcataaatgaatcaaaatcattgctttcctttgcgcattgaaaaagataacgatacttttccagctgaatggtatcacagatttcgtgatatccagtttcaaacgaacagaacctaccagtacccactgcacacatgaaatgtgccagtgacataagcagccagtaccttttgattccctgtgcagagcgtatctgatagctgtccagtgccagtttatccttacactggcggaaaaatacttcaatcggccatcgacacacataccaggaaagaatctcctgtgtagatagggctgcgtttgtactgatgaaagcacgcaatgctttgggattaccaaatgctttttccggataactcaaaagaactaccgcattttctatgccgttgaggtttccctcgtaccggtacacataatagtttcgttttttgactgtcacaaggtcaaattcacgatgtgtaacagacaattcggcggccagttcacgaagtttctttttcattcccgatggatacagcaaacggtttgttttcaaagcaccgatggtatggaaacctctctgtgcaaaggtattgattatcttttcagaaacataccagcagtcgcaaagaaaataggacattaccggtggaacaggcagctcctttgcaatgctttgtacaatgtcaatcttggaaattgacttattgtacattacaaaagcatagttcagaacaatgccattgcaggaaagcataacagcaactgcctgatgcccgtagtcctgttttccctttaaatgggattggtgaaaatacgcatcttcaatcggatgtaaagcccgtgacgaaggctttgtctttgaagcaatcgtatcgtccacaatgcagaaaacaggctttccggtgcgtgctgcttctgaataaataatctcaatgacagagcattttaacgtatctgaaagtaatgaatcatcccattttccggaattgagaaaatgggcaatcgtcgttctgtggcaggaactgtttttagcaaagtccgtagtttttccatgatatcctaaaatgaaaatactgattaggatactcataagatggtttattactcggttcgaataaaatttgcataagtttaattttttaaactggttgtatatgaatgaggaatgatgtatagtatttgcgagagacaccttctttcgtaaatgttgcaaatgtttgttttggcactttcattatacaacacatggaatcgaggtgtctttcttttatgcaaaatcacgaacttgctcatttatagattttttgataaacttctatcagcattttatccagttcatcttcttttgaaaagatacgcattccaagaagatctttcctttttacgcaaatctctaatttccggattcttcctactaaaagatccacctgaagttttctccggtctgctcttcttagccaaggacgtttcacaagtatatatcgaaatttgtggctctgcgtatatttctttaccagtctttgcgcaatttcaagaatttccgtttctcttgccatataaccctctttaacagtatgcggaattttcttcttatacccgtcataagcagttgtaccagaaaaatagttctcgcaaacctgcaataattcccttctgatttgatttagtacttctccgtctgtggttaggtgttcttctgctccaaactgatatacctttttccaatcatacagtttcttgcgccaaacatcttctccttcttttaaacaatctggtctcttttcttctatttgttccatagtatttaccaactcccatcttctgaaatgatcgaaaatccgccagtttatgaagattcatatcctcatgtacctttctcttctctgtaaaaacatccattcttttccaactgttccagcctgtctaaaatttctttttctgaaaaacaatccccctgtttctgatgctttaattttctgtacatcattcttctgcaaatagggtgagccggtccatagtcataaagatatcttgcctctcttgcattcaggttgcaaaagattgcaatcagtaactgataatatcctgccattgtttcatctttcatgcacacctctttcctatcggtactttagccgaaaagttcctcttgctaaaggcagaaaacaatcggcatgttcatataaagttgcccgaattctcgcctcatagtttttattcttcttggcttttgggtgctctcttaattcctgatatagctgctttagcgttgcatgtccatctagatgttccattgtcattcgtaataaatgaaaccacgtcagtgcaatagaatcctgttcatgtatctggaatgtcccttcctttctgattgaaaatggtacaagaaaaatttcttctttttgaaaaagtaccaatgtttctgtcacaataggaataaaaggttttcctgaatattgtttcttattggaagtgcaatgaaactggccctttacaatccaggacttcatatttccaatatggagcatatctgctgcaatagaatggaagatgcctttctgccggatgtctcctaccaggattgccagatatccattgtgtcttaggctaaaatatagttttttgatcacatagttcagtttttcaatataatcttcatagttttcacatctgctcaaatcatcttcatgcggtcttccccacatatttccggaataccggataatgtcatggtaaggtgggtggaaaaaaattagatctgcactgtgcattacttcatcttttaatgcattccagtttccaatcccctttggcggatgcgggtttaaatcatataagacagaggaaatatgcaatttctctgccacatcttggctggttccggaaccgctcatgggatccagaaacaaaaaatccttcttcttttcatactgcctgcatttttttacaaactgaatgagttttgctacaacctgtggggaacaatttcctctccactgattgttgcctccttctgcccgttccggaaatgccataaaagaagtcagatcttgtcctacgcaatgtgtaagttctcttgtccctaacgtctgtacaatttgtttccaatcggaaccaaattctgtgcgtaaaattttacttgcacgctgtaagtcactttccttcacactaccatactcctttctgcacatacaaaaaacgatacaaaaatccattctggttttcatatcgtaagcgcaaaataattcgacggattgtgttgccctaaaaatcattccataataatcattagaaaatgcaagcatttcactttatcttctcttgccagaaatgatagatgcgagcattttactctatccgatttatggaggtgtgctcatgagaagcaaaagaatacctgccgaagaacaataccgtctcatcatggaatgccgtcaaagtggattgacagatcatcaatggtgtgtggaacacgacatcaaaccgggaactttttacaactgggtaaaaaggctgcgtcagaaaggttgtgtggatttgccagcgtcaaccggacgcatctatcgtgcaccggaaaaccaggaagttgtcagagtggattttcatgatactgacccgctccaatatgaacagccattaaatgtgattccggtagctacggaaagaaataacctttccgtagcagagccaatgaagctgtctgtaggaagctttcatctaacaataccaaatggaacagatcctcagcttctggctcaaacgcttcgcattgtgaaggagttggaatgttaggggatatcacagccgccgatgaaatctatatcgtaacaggcagaacggatatgcggaaatccattgacgggctgtgtgctattgtagaggatcaactccatatggatccaaggcgaagtgccctgtatcttttctgtggaaaacgttgtgacaggatcaaagctttgctctgggaatctgacggatttgtgctgctgtataaacgtatggaagtccagggaagattccgctggcccagaaatcagttggaagtaaaacaattgacctggcagcaattcgactggctcatgtccgggcttgaaatcgaacaaccaaaggcattcaaacctacggaatgatcgcgtaaaacatctatgccaaccaacagaaacggagggggttctcaccctatatcatgtctgaaatcccttgtaaatgctgggttttctgcttctttttcattgctttttatggtataataagagcagtgaaaaaggagcagaaaacatatggctggtaattcaaaagattcaaaaatcctcgcgtacaaggacatgatcaaccaactgaataagacgatttccacacagacagaactgattcagtctttacaaaaaacattggaagcagaccgtctggaaaaagaaaaccttcgtcagcagattgaatatctcacgaagaagctttttggtacttccagtgaaaaacggaaagatatcgatggtcagctgaatctttttgatgaagccgagcaggaagcagatccgacatggaaacaggaacttcctgatgacatcactgttccggaacataagcgaaaagcacgacggacacatgcagatctctttaaaaatgttccttcctgcgacgagatcatttctcttccggaggaggagcgaaactgtccaacctgcggaacgcagatggaatgtattgggaaagaattcgtccgccatgaatttcgctttacccctgccaaaggaaaagtagtaaatatctatcgtgaaacctataaatgcccggaatgtgccatatcagaggaacacccagatgatcagacatttgtcaaagcgcctgtccaggaaccattgatcccagaaagttatgcatcggaatccgttgtaggatgggcaatgcaccagaagtaccagaatggtctgccattaaaccggcaggaatcggaatggaagcagctgggtgtcccattaagccgggctacgcttgctaactggatcatttactgtgccgagaattacctctgtcatgtttatgattattttcaccgtcagttacggatgcgtaaatatctgatggcagatgaaacccgggttcaggtactgaatgagccggagcgcaatcctgaaacagattcctggatgtggctcttccgcagtggagaagatgggcttccgccgatcctgctctatcattacacagagacaagggcaaagttccatgcggcatctttcctacaggggttcagcggatatctggagactgatggataccagggttataacaatctgccggatatcaaacgatgctcttgctgggcacatgtgagacgttacttcacagatgccataccgaaagggaaagagtatgattacagccttccggcagtgcagggagtacagttctgctccaagctgtttgattgtgagcggtactcaaaagcaaaaaatcatactgcggagcagagaaaacagttccgtcttgaaaaggagaagccgatactggaggcattctggaattggctggatcaacagcgtccaaacaagggaacccgtttggcgaaagcggtgaactatgcccaaaatcggaaagacaccctgatgacctatctggaagacggtcattgcagtttatccaataatcttagcgagaatgcaatcagaccattcactgttggccggaaaaactggctgttcagtgccagcccgaagggagctgcctctagcgctattgtgtatacaatggttgagatggcaaaagcgaatgacctgaatacctacaaatatctgacatatctcttatcacagcggccagacgctaaaatgtcagatgaacagttggaacagcttgccccatggagcgagactgcgaaagcgaactgtcaaaactaaacatagagcaaaacgcttgcatctatcattttggtgcaagcgtgattcatgggcagcgtagcaatattttgcgcttacttcatatcgttctctctgcttttattttttctttcttctcctttccaaaaggcaataaaaaaagcactcaaagaatttcttcctgaatgcttttgatatacgcactttttaattaagtatcaatacttcaaaattctattctaaccttatggtcagaaaaaaatcacaattcttcatatagaagaataaaactgaattacaaatttatggtaacataataaatattttaagtcaatattttactattattaagaaataaacattttcataatttttcgcagtttctagttccattttaatcattccctcttggttaaggcacatagtgctaataagaaagcaagtattccccataatagaactataaacaaatcgtaatatgaaatttcttttccaccgaaaaaagatgtccttattaagtcacttgtcggtacaaacggtaaaattttataaatatattctgtccacctgggcaaacgttctgccgggtatgttattggggaaaatagaaggccaccaatcattattacctgtgttgctaatgccatcatattaggtggaaaccaatatgcaatgcaaaatccaatacaaatcatggagaattgtgaaattaaaataatcattatgctaccaaaattgatttgtaagtctacatcaaaccttaagactgccgctatgcaccccatcaaaattcctggtaatgacgcaatcccccatataataatatctgataaaaggataatacttctagaaacgggaagggttttttgatatttaaacactccattttgtttagactcattaacaatctgcggagccaatacacacccaattgcgataatatctaaagtcaaagctcctgatgataaatataccgcagtcacttcatctatttcaggtatcagcaatgccattccgcatataattgcaacagcaaaaataccttgtacaatgctaaaagttggaattaaatacttatgacggatcagactccaatgaattattccccacagtttttttaaggctactattgaattattaggttgtactttatttctcattgaccaaccctccatatgaaacatctaatattgctgatgtaagtttgtaatttaatatctttccttctttcatcaaatccaaaacccattgaatagcatctaaaatttgttctgaagataatgtaaatatcattttcatttcatcttttataaatttatgttccattgaatctggaatattttcccaatcattaaaattatcaaaattaactgataaaacacttgccgcaaaattattattaaaagttgaagtaggtgcttcacggataatttgtccgctatccattaaaatatatctatctgcatattgttcgacttctaataaattatgcgtaactactaaaataatgtgcccttctttagctaattttttcatatattgccaaactaattttcgacgcactgggtcaatatcatttgttggttcatccaataatattatctgtgctggatatactactgacattgcaaatgaagttaatctttgtaagcctcctgataatttatcccctggttgatctgcccattgcccaatatccaaatcttttatcacttgattcgtataagaacctattatctttccagaagcccctctaatgcgtagaaccgattctattgcttgacgcaatgtaactcccacaagcggagcatgaaattgtggcatcattgatacataatttctagctaattttgtattatctataaatgatattccattgtaagttattgttccgctgtctggttttacattgcctacaatttgatttaacaaagtagtctttccagcgccattatgaccgattaaagcagtgacttcattaggcattaaggtcactgtgatattatcattggctttaatttttcctttcctatatgttttgctaagatttacaatctgcaattctgaagatcccataaatcccctccttccatattagttatattcgaaagaaacaaataaaaatatttactataattggaataatccaaaaaactacgattgcaagattcactattttccctacataattcaatattttccatataaatactgtctttttataaacagcattatccgcatattcttccatatcgtcaatcaatggtgtatctagtaacaacattgcaaataaccgcccatcacaatttttatgaaaacgtaactgccataacactcttacccataaaatagatatagctgatagtactatccagttatcaaataaaagcctgcttatagaaaaaactgctagtaaaattacgtccaaaattattccagctaaaactgcacacactcttgcaagtaatgaccaaacccatatatatgtcattgaaactgttacaacagatttttttaaagaaatgtggaaagatcttgatagatttttccaatttcttgaatatataatatggaataattcatgaatcattgttgtagtagcagcgaaagctattgcaaaagaaatggatctccataaatctattttgggaggaataatcatgctcccaataggaatccctgttgctaaagttaaaaatatagttatcaaaagtgcaagcactccccctattagcaaagcatatcttgctgttttccattttttgttatctttttcttcaggaattactgccgatgcattttgttcattattataaaatccactttgtctaaaaatttctattgtttcatcattgcacttttcatttatactagtcccctgaagaaaactttccgcaagatcttcatcaataaccaacgcctctgaatcaagagctaagacaatccattttccatcctttagctttcttaaatataatggcttatttgtcatctcctcagaccttactttctgttttcgtaatactgaaatatttcccaatcttcactttttccacatccacaagttggacactcctttgtataacgtggccaagacggatgggtaaatgatgagccatcctcaaaatttatttcatactgagtgcctaaacttcttggttttgcataccccgttataacacgtactgcttcatctacaattgctgccgtaagttgaaaaattgcaggtgcatatgcaatcgttggcggattaaaattaatatttctaaatgccacaaattgttcaacaaattgagggtcgtgcatactataatgtaaatttagacaatcaaaacatcctgtttctccaggtattactgtaaatactcttcctctactaacctgtgatgctccgaaaacgcaaggtacttttgcctcaataattgccttattcacaatacgttgtgcaacaaatggtggttcatcaatagcgcatatcaccaaatctacaccttcaataaattccaatacatcttctggggtttctatttttttattgtgtgcctcaatcataatgtctgaattcattttttcaatggcttttgctgctgtctccgctttaggctttccgatatctgattcggtatataataattgtcttcctaaattactgtattcaacattatcatagtctacaattataattttctttggtcctagccctgctaacatcgttaaaatattagaacctccgcctcccagtcccaaaagcaaaatggttgtttgtcttatctttttttgatattcatatctattttcatcaatattggcatatctactaaaataattcacattggcaatatatctctccgctatatcttttccttgttcttctagtgtttcttctaagaacccttcattttctaatatttttattccctctagaatgtcttcctctgataattctggaaataaatttctcatttctaggataacttctttaacaggacgtccattcaacctacttgccaattcccacaactgcccttcaggatcgccaaattcagcagtaattcccagttgtgctccaattctaaattctttcttattaagtctgtataagggataaataggtttaattctaggtctattatataaagtattcatttttctcctcctgtaatataactatataattgctcctgatagtatcaagccagagtatattcagtgaatatctctggcttgatctcagtttttttattggactgtcttagaagacgatccaccatgctgttgcgtcaactttgacagcacgacgaactgtaatattcttcataatgtgtcacctccttctcatatgtaattgaataaatcctgaatttcaagactatcctatataaatttcttctatgtttgctttcacaaacagagaaaaaattttctaatataaaaatgacattcttttatacttccattttttctactctatcttgcatacttttaattgcaataaaagacaacataatcaaaaccaataatagtacaaataacaacatatcggaataaaatgtcatggtgattatttgacaaataaataccactataatgcacgctgccactattgtaacaatgcccgattttctatagaagcctatccataacgatacagtactgcaaaaaacagttaccattgtataacataccaatcgaaagaaacatcttagtataagttgtatagaaataacatctgatatacacaaaggaaacattttctctgttccaataaaaatagacaacactatcgtcccgctaataatcattagaaaacaggtatacaacaaacaggttatgatttttgctgttaaaaattttttccttgcaattggatatgagaagaaaactattgcttttttctcatattcttcaacaataatcttagctaacattgtagttgacataattgtaaatattcccgtcataacatctatgcttaaaccaatcacaaaattatatgtaccaaatagtacagcatcatcatctcttggttccaaataaggtattagcgctattaaatagataaaccctagcataactaaagtagtaatacttgttgttatccaatacggtttccaattgtttttctgtaactcaagtcttattagttttttcattccagtactcctttagacatatttataaaatattcttcaagtccttgaggatacaaactctttatctcatttattgatttttcatctaaaattttaccattgtctataaaaataatgtgatctgcaacctgctccacttctgaaaggatatgactagaaaatattattgtaataccatttttaactagcttacagaataattctctcatctcttttattcccaaaggatccattgcattaagtggttcatccaaaattaacaaattaggattacctattaaggctcttgctattgcaagcctttgtttcattcccattgaaaaagtacctactggttgtttctctacattttctaaaccgaccatttttaatatgctttgaatatcttgaacatgtatccctatatactcaagatgtatctctaaattttcaatggcagataaattctcataaaaaataggtttttcaatgatattccccgtttcctctaaaattttcagcctatctttcacgctgtcataacctaatacagtaattgttccagctgttggtttcacaagacctataagcaatttaaaaaaagtggtttttccggcaccattttttcctagaacacaatgaatagcatttctttcaagtttcaaattccatttgcaaatcgcttctctgccattaaaatttttgtataaatcatgtatttcaattgcataattctcgttcataaattccctcctttttattttagagatatacatacattgcaaatgtatgtatatctctaaaataaaattgccttttgcggcaactctatttttcggtcttttcataccaatcatcaatcatatttgatatttgttcattaaatataggaaccccaacaaattcgcaaatttttttaataaatacaaatttatgatgaaattcctcctcatttgctggaaaaacagatggcataagccatatttctagcaatggtataatctctgatatctcttttgcatattctgttttaattgaaccatcatttttcccttcctcaataagttctctcaaagcaggggtaaaatattttttttgagattctatcattccagccaatattcttggattttttaataatggaactgcctgtttagatagctctgttttatcactctcatcttgatttaacataattgctaattggatcttttgaagaccattcaaatcgtttctgtttttaacaatactaaatggattgttctccaaaaacattttatctgccagtgcatttattatttcttcttttgacttaaaatgatgatatactgcaccctttgtcataccacctaaattattaacaatatcttgtatagtagtttgttcatatccttgttccaaaaacaatttttgtgctacatcaagaattttttcaacagtcaactctggatacttattccttgccattcttcaccgcctttttcattcttttggtatgtatatatactaaaacaatttgagcattttgtcaagtatatcttattacttttttaatgattaacttccctaatattcatatatgatactctctcctctgaaaaacatctcacttcttcataacggataaaacttagattgccattttattaaaatgtaatttatcggcaagtcaacagcatatagcattatgttgttgacccgcctgatattcttataattatgtcctatacatcaatccatgattccagttgtatttctacattacctgtatacccccactcttcaacttcaatatatctcctacattcttcatcccttataagcggaactttggatattaccgtcccccaaaagtttaccaagatatgaaagcttaattcacatggaattcccatacactcatcatcatgccgaacttcataacaataaaaaccttctggaacactatccttttgaattcttcccgaagaaaaaagtgccaaggtatcaaagatctctatttcttcgtaagtttcttttcgtgcatcatatctctccatattatttgcttcttctttctactgtttttacctattatgtctatcttgttcatttcgcaaaaccatctttaagtgattgataatgtttgtaacagaaagatcactttcacaaagataccaaggtgatttttgctgttcttcctgtaaatatcgttgtatctcctctagttttattttctgtctgaataattcctttgtaattttactcacataagcagttatttttgcatactgttcaaatttaaggctttcttttctaagttctaatcgtattacgtcacacatttttttctcactggaacatttttggaataccgcaatccgactatacggaccttgtatgtatgctctccagatacgctcccgccttgccacaataaacaagacctcctgattccctcttttccatattttttgatacgcaggtctatcatatctattccatacatctaccaaatgctcatctctgaaaaaggcaagggggagtccttctcttcgcatatactgctgaaactcttgcttgccaaccccttcttctattttcttctgtaaaaattggaacatggaaaaataatttttccactgatattccaacaattcgcctgaatataaaaaatgatctatcaattgctgcatatttttcaataagtacagccatatttctgcatcttctctttttaggcagaaaagcaattttccatagtgatacgctctcagtttctctccccggactacataagcatactctgaaaaaatatctcccttatcggaatgtactgtctttcgataccattctggctttatgaatcgtatattctttttatccatcaaatctaaattttgatatattctctccataaattttaattcctgtttttctgcaaatgcccggataatcttttctccatatccattgtccagatatgaatctgacattaagtaaactgcctttttaatttttcctttttcttctatcacaaaatatccgtttgtcataatttctcctaaatcgtattattttttaactttactataaatatgtatccaaatattgtttcactctattcaacccagcctggttttcagatggtattttgctttccatctccaaccatgcaagaaacactcttctttcttcttcatattccctgacaacacttcgaagtcttcgaatctcacgttggcagggtaataccctttcttcgtctgtcatatcagtaccttctcccttttatattctgtttctctttttcttctacgtctatacactcaaatgaatatttgttctcatcacaaaaactgcaataatatggatattccttttttaaggcattatcattctccggtagaatttcgcttccgcattttttacatatcaacttgttcatatcttttcctttcacttccggatacaaaaaaagacaccaaatccattgtttgatgtctttaaataatactattccttttacttcacttggggaaaaacgatattattttttatcccttatttctaatacctcttcttcggagatattcaaaagtttacaaatctctgaaatcggataattattctgcaacatggtaagaatgactgcttctctctctttttctctacctttctgttcgccttcttctttcaacttctctaatgcctcgcacatactgtttacctccatatttctactcatacgaatcagttcctttgatcctgtcatctgaccgaccactgttaatagatctgagcccatctccttgtttccatacttctcctgaattttttcaaaatgcccggcaaagatttccctggtaatttcaaaaacactttgcacatctgtattattgaacacataccggtctgaatcccgtacttccaaaaggttcattttgtaatctgagaaaatagcggcaatttcttccggcatttctacaatcatatctttcagacaatacggtccgtcccattgtttttcaccataatacaccgtcaatgtaataacgggatgaagccggtcatctttcctcattttcgatagaaattcatcttctgtctttttgtctgggctttctttgtatttgcgtgtaatttcctgatattccttcaggtaactcattgcgtcatacaccatatgacgcagcggcatggcataatgaatatgctgctgactttcaattccaagaacaacaaattccactccataagcagtctttttaatcacatctcttgttctggataaggtttccttataatcttttaattgaatgacaccagaaacatctgtatccatttcatgcaatgtctctggcttaatgacctctttcccgccaaacacaactacattaaaaagatcagcgaaccgttcattattccgccaaaaatctttaaatataatatctgcttttgtatgttccacgtaaattcctctctcttctgcaatcactgactctcttgttacaattattatatcagacatcaaaagaactgacaaacgaattttcctattgtgcttccataaatcctattctttcacatcttccatgcatacaatctttctgaaatatcggaagatagactgttgttttcaggtactttccttctgaagcaatcccatgttttcctcccagtgagtccaaatattgctcgtttcccttcgtggctgaaatataaatatatctgctctctttttggaacttttcctttggtatatcatcaatgtaatcataactaagtaacaaagggatacagagattttccgctttctttcttaccatatcaagaagaagttcaaacatctcctgttccagtttttccgaaattcctttcacatacgctctttccaaaaacagaaccagttgctctgtcttctcttccttattatcctttgtgaaatctacaaattcaaattctttgttctccctttccattttttcttcagatgctttggtaagcctaagaattgcccgaaggacaatcttgccttgataagaaatatatataattttcttattactgtcaaagcaggataacagacacttccgatacattcctgtcttgtaacttagacaggttttatccggcagttccccaatttgcatcactggaagaaaacggtcttcttcccagattttccattcctttttttgaagttgcagattttctgcccacagtttcatctgtttttccaaaattggaaaagcaagttctttttccagatctgcctcgtggtattttaaatctttaaatttccccattagttctgccactaataatctgcgcaacatttctgtctgtccggtatctcctttataaaattcatacaaaatttcagaaccgccttgttccaggaatgccttgatatttgcttcatactctcggataaacgaatcggagatagcaaaggtgctcttcatccattcccagtttggatcattttttattaaatcgtcatagacagcctgaaaatttttgtacccacttaatttttctttatttactagcaaataccgcagttggaaactgtttttcacttctggaagaaaccgtacaactttttcccaggaaagaaacaacttcggtatatccgttccctctaaaccagaaatatttcccagttcttccttcatccacttagataacagtttgtgggacaaaaaagcagcaactgcttccaaagtttcttcactgttttctttctccaagagcctttttttcaccacttcctgcatgactctcaaacggtcatcgacccttctataatttagtttgtggtataagcggatatatcccctgtcagggcaggaagtaaataattttatttccgcaaaagtatactctttttgtgtcatatctgtcttttctataatagagcattcctttatttttctgcattcctttaaattttgaaaatttaatgtatttagattgacatactcttcataaaatgatttttcaaataaaatagaattccacggaagttcaagaaacagttctgtattttcttcatacaatttcaaaaaatgttttttctgatgtttgactgcataaagaagtactgactcttggtaatattccaatcgatccatcgcttttatgacataccgataaacctcctgtacataccctgctcttgtatagaaatttccttgtgaaatccatccttgtcttacaaatctgtttaaatcaaacaataactgtttattctccagccatcttgttaaaaaacaggattgtatatctttatgtaagcgcagcataatttttcttagtaacggataaagttcttctgcattttttacaatctgtctgtatgcctctttgcttaacatcggcaatggaaactctgtcaaatattttaaaaggttcaatacattcgctttccctaaatcctgaaagaaatctttctctgcaatcacttcgcagaaaaagtccccagaaaaaatcggttctttcaaaaacattcgttctgaataacttaaatcttgtaactttttatcaccatatgtttcgaaaaactccagatttgcatttaatatactgcactcttttccagacaaatggctggaaaaaaagtattgcagatatatggctacatatctgtctgaaatttcttctgtttttaaagctgcttccaattcctcataagaagagtccagtagtgttccctctgcaccaccgataaaactttctattctgtaagctgaaattcctgctttttgcagatttatgatctttgaaagaaattccggataaaccaccaatttctttccatactcaatcggaagctgtttcagtatgcttcttttttcatctgtatcaattgctttcgtaaaaggaaggagctcttgattagaaaatcctaaaatctcctgccagccaagtccttccagacccttaacaattcccatgtgttccttcactgttgtaaacattttctacctccgtctttatcaaccattcttttatcgctgctacctctattcctttcttttttcctaagtttaatagcagttctaaatattcccaaaaggcttcttgtgataatttccactctatttgttccaaatacttcttcaaaaaccaaactactgcttttacataggcatctttctgataagaataggagagtaaattgattttagaaaaaagatcttctgctgttttttcttcctgcaatttcaaaaacttttggtatgcttctgctgtctgcttttccagttcagcctcttttttctgccttgcggcttcttcctgttccttatggaattgttctagttcttctttctccatgtataaagccctaagttttttgtttccagcttcctctattccaagttccatcagtttttcccaaaatttctgtgcctgttctttcggaagccaaataagattttcctcttttcccaaaacatttaaaagaaaatcaaagtatttttgtggctgaaaccgataaatagattcttctacccagaaaaacaactgaagaacctggtttggtttcaaatggggtttcataaaattcatttcatcgtattctcgtctgtaatagtattcctgaattccaacacttttccataagaaattccgtttccctgcttttctgatttcttccatggagcggttatccaaaagaagttttgcagtctgaaattttaaatccgtatccatttcttcgatataggaaagaatatagccatacttctttttttccggttcttcccattcagaaatcacttttccttctccctttgtaagcaattcttttataatctgtcggggatctaagaaattcttttctgcaaatgtttcaaaaatattatgattttgatagttttcttcttgtagcatctgttggatataatccacctttgtcagtcccctatacatatttagatactcccgaagttcctgttctgtaaatgtttcgttatacaaagtttcccggatttgcttgtcaaaatctttttttcccaagaatagcagaatttcttttgcctgtgttttacataatggaataaaaaaccattttggatttgcctgttgttttcctgcatagggataaagcaacgcatatactttggaatttttaaccgtaacccgatgtctcatggcttctaagatccctttatatcctccaatcttgatctcataggaaaaatgctgtttaattagttcttcgcacagcgcatagatctcttctgaatattctttcttctggttacagataaacgaacaaaaatattccgaagcccgttcccaggtaatctggcttacttcttctaattgatcctccttagctgcctttagcatacataggtttaaataaaaaatttcttctttttgataacctgccttttgcatctgttgcaataactctgaacgttcttttacatgagtatgctgcatctttatcaaaagttttaatctcgaaaatatcttttttctctcctttttaatttccgtttcataggctctgaaaaaccagatatacatttccgtattttgaaaaatattcacttctctttctttttcgaagaagctgcatacaagctcctttaagatttcccaaatttctttttcacctttgcctaaaaataagatacacatacattctgcaagttctttgtatgcgtagttctttatcctttcgtgatagagttcttttttctttttagaagatgtcagaaaatacatcgcccctgctagataaatatcagtttccgcttctcgttcgatccgtttcagaaagttttcatattgtgttcccacatacatttgtgcttcctgtaaatcagacatagttacaagagcaaatgccaacgccctgcgtatttggatactatcccctatcttttctttataccgctccagcatctcacccggatactgaaaggtatacgcatcttcctccttctgttctttccccattggaagaaaacgtttatcctcttctttttcaaatctccatgccttatcattctttgttgatgtaagaaaaatgatatgcttcatagtctgaaaactgtttgcatctattttttcttttaagatatccatttgttctcctttctggaaagggctgcttacacagccctttatttctctcttttatggttcatctgtcatataattacagtctcgaataattgggactttacccttacgaatttcatcaaaagctgtccgatacccgctcttttcaggttttgtaaaatttacttcccattctgcaatcacctcttctaatgcgagttttttcgggtttaaaatcacaagaccatgcaaaatgccagatacgatcctttggtattcttctgcatattcccgacaatccaaatcggtatctgcgtaccagcaatccaactgtcgaatcatttgtaggcttctccatggcgacagctgcacaggataataaaatcttgatgttttggaattgctttcatgttcttccgaaagccagataactgtttcctttgaaaagctgggtaccaaataaccgttttgggaatattcctccaatattccaagaatatcctcccaaataacctgtcggaaggaataaggttgcttcgtctctgccaaataataatcgtcatctagcaaagaaattcctcctctttttacttcagaaacacttccttctccatcttttaaaatctcctttacaacatcatttggatagaaggaatccatgcatctggcaatcttttctgcatcttctatccttccctgttctaccaatctgctttcatattctttaattccttctataagcctccaccattcctctttggaatttggggaaccattttctttgccactatcttctgatatttcttccacaatagtatcctctatttcacaattttcctcatcgagtacatcactgttttctatataattcatttcacctaatggaatttcatccaaatgttctttcgcatattccagtgcctctgagaatgtttttatggtttctggcagcaagagttctccatgataataggcattacagagaatagaacaggaaagcttttgtcggatattgcttccatcctcacaaaattcaatcgaccagattagattgtcaggtatatgctccatttctggaaaatacatgctacattttccatcttgaaattcccattgagttgcttttccaaaatcaatccagcttccttttcccctgttagcacaactgacttcatgctccggctgtccagatataaccgaataaaatccattactttgtaccacgttgggtattctcctctgtcctaaaaatttattcaatcgatgtgctctgataataaattctctcttctcttgtattactcgttttaattgtgttaagtttttaatttccatcctgtttcctccttacgcagcatttttcatctgttttttccataccggcaataattccggataagtctctctcgataatcccaaacgttttgcataaatctgcatttcccgggaactggaaaaaagttttgccttttcaacttccggaacaaactgctttccattccaaaacaattcctgttcttcttcactttcgacagataccagtatccacccacgatagcaaatctgcgggttcataccggcataccaaagatacctttgggcaaacatttccgcttcctttaagctttggaaaaaagctgctttccaaattttcgccgtcacaatacgtttatctttaattttctgaaaatactggtcttttcccaggcggatgacatatcctgtactccaaaagttttcaacccattctttgttctgttccataaatcctcccatcaaaaaaaggaacctaaaaaagtcccttctgccgtttttatcccatataatctaaaagtttctttacaatctgctgcggaagcctttccagatcctctgcattgatacaggcatttccataaatttttcggatatcttcctgatccgttccaatcgctgctacaagcagtataatctgtttctgtttcaaccgcttctgtacgttctgcaaatcttctcttgccacttttccgccatatccttgtgcattcggaagcccatcacagaaaaaaatcaaaattttcatcttctccgttctttttgccattttttctgccatgtaaagaagcgctgctccgtccctattagctccactggtttccatatctaaaatccgatactttccttctttcttttcttcaaactccaaataagaatgcaaacacacgatttcctcctgccttctacctgtctgttccgtccctgtacaatgtccatttacacagatgggtataccaagtatttgtgcaaactccacgacacaaagggaagtcaaaaccgaagtttcccaccgcttgttatctatggagccagactgatccaataaaaatccaatcgctgtatccatatttctggaaggaattttggtcttaaaaattcttttttcaggattccacagatgtgccatgtccaatccttttcccatatgctgttctcgcagaatataggttttcttcctttttagaactggcagcagatcctgcttcattttcgtttggatatgttttatttgcggtttaagatttctgtatttttgatatgccgcttgcgaaatgatttcttttcggaaaatatgctttttgatttcctggttcacaggtgtaaactccgtattttctaaaatctctttcaaacgctcccgcatccattcctcatatctcttttcccgtgcttctctttttaattccagacagatgttttgaagttctcttccaatatcaattgtctttaccgtttcttgctgcaattcagaaagtaagggctctgttttttcttctgtcaggctttcctgctcttttgttacactttctccttccatttgaacggattgtatttcttctgaaacagtatgtttcagttctcctccattccaaagaacatccgaagcttcctttcgctccatgcggatttccctgcaggaaggttcttccgagtattgcggcagatcttctttccactcatcaaaagtctgttttaatacgttttctttgttttctcctgccgattttatttttctttctatgccctccgtttcttctaaaaacaaaggccacaacttcaataaaatctgatttgttgcaagataccttgtgctttcccccatatcagcaattgctttcgaaagaaccggaatacagtttctaagcagttccatatattctgtaacttctccgtcccacacgttgaccttgtgggtaaacatatattgcaccaacaaaagtaacataatctttagttttgatttctcctgtactatctggcttttcagactggaaatctgctccatattcctcttacgattttgcaaaattccctgcctgatactgcccgggaatcttctgcacatctgttcttcaataaaggcatcttctagatatccatgcagccttccggctgtttgcagataaagtcctaaaagaaccgcatctttcttttggaaaccctctttcatactttgtaaaaatttggtttcctgctccgtttccggtataggccaggctggatataaaatcccatttgcaattccatctatatatttccgtctcagatagatactgctgtaattctgatgtccgcattcatgtccttctacacctatcagacttttacttctcaaatccaaagtcggaaaactttgtgtaagtatattcatagtattgatatatatatagcgcccttcaaaataaccggctctgtgatccgttgcatcggaataaaatcggatctgtgcatcatgcttatctgtaatctcttttccaatccgttgcactaaccttaaaaattgaggagaaaaaaatacttccatgtcccgtagcaaacgcttctctgtctgcctgctatttcttattctttcgcttctcatacagattcctttcctcactctacataaatctccatacatacctgccggagcagattcctgtcttcttcatcagaagcaagcttggataataccgtatcttctgcagcctttacaagattttgggtgcgcatatattcatatatccagttttcatattccctgtagccacaaagtccggcttttccaaattcttcttttacgactgcatccagtcgtttcattacctttgccatctgttttaaaacttccatatctttgcagcctgtccgaaacatggcacgttctgccaactgctgctctgttaagtctttgcgatgctgtaccttattcattctggatactacggaaaaatcaaattccctatttgcaacataatttagattggtcgtgatgatgataattgcatttgggtgtcgttctacgacttccccgtacagaaggtccaatttcctggagtcatctaataaccggttaagttttccaagtgtccccggctctacaataagagaagcctccataatttcaatcaccgaaggcattcggcagccttttatgatttccgattcttgcattacaaaatccccttcgttttttgctttctggtaaccggactggtacactgcatctaacagttctcgaaaggcttcgcttttgctaatcccttcttttcttgtataggctacatcttccaatacctgcatcggatctgcaacaaattcctgtaaagaaggaaacttcatatggtcttcggcctttttcctggaatttggataaattcctgccaccagtgtactttcatcggtttctggtccacagtttaaagcaaaataaggaacacctaagatctgggcaatcatctgtgcatctgtcgtttttcctgttcctgcatttccggtgatcataaatttccggaaaggtgactctacaattgcagaaagaatatcctgcgcatattccccgactttcatatcctctggaaactgtggaatacgatcctcataatcctttggaaacgaccagtgctgcccgtaaatcttctttaattcttttaacgtccattctcttgctttcttcgtttctcccaaaatctgaaatatacctttgatcgcatcgtttggtgcgtatagttcgctttcaattgcaagtttcgaaagttgttccataccattctttccaagctgacttttctccaacggaattccttcattgttgaaatcctgtacattttctactctccggtacaggttatcacaacaaagaaaagcagcttttaatgcaagttttccatttttccagccttctttcatttgctgcatgaataaaataaaattttgagcaaactccaggttatataatgcttctttcttttccagactgacataaataagcattgccagaacttcctctccgtcactgacgtttctttcaacaaaatccagagctttatatgtttgtttttctgttttacagataccacgtatttttgcactgatcggattataaaccaatgcgtggcgttgatttccctttacatattccatacaatagaagttcaacaaatcataatttcctttttgaaatccaagggctccttctgtttgtttcaaataaatccctgcaatattgagcattgccctcaatgtagggggatgcagtgttgcctgtcttccctgattatactgggaaagccattccaccatagtagtagtttttcgtaatccttctttttttaaaaactggctgaatggttccggcatttcttcctgaaatgtccaggtatcaaatagttttatctctgccattttctctcctttctgtctgcaaattttaggtatgttcctcctttctacacgcaaaaaaagacaaggtatttgtctttctataccttgtcttaaacttattcctatattttattgcagactatgccaaagtaaatcttctgctactatgcagaataaaaattcattgcacaaatttgcttgtgcataaatgaatacaactttatcctagcattagatagagaaactgtcaacaacagttttagaatcataagatttttattgttttttgaaattattattcttcatacgaagcgactccttacacaaaatataagaaaccgaaagtaaatagatcctttcaatgcaaaaaatttctctaatatagatagtattcttatttctccgtattcctaatatattgaattttaggacgttttaactggataaatctggcatttggtgtttctaatggatcgcattcttttccatttttatctacgtatgcctgtgtttttataataactgaaacgccatttccacggctactttccatttctttaaaagctttttttaaattcttctttgcgatacgtttattcatggaattcctccttttttgcttccgtctttaataactgatattatactaaattttacaactatatgcaatcttgtacacaattttttaacgtaaaatcggactattttctactggataagccttctctttcaacagtaaagaagatttgtttcttcccccaactctagcttgtgattttactttattttcgtctatatcttttctagtactaaacagctttagaattttattcaaagagtatgcgtagttatccataccatacaataagggaacagccagagcacagctcaccttactattttcaaaattcatatattttgtactttaatgctttcttattcatctaaatatttgctattttctttttcaggaatttttagcccttccattgcatgttctactgatcatcccctcttttccataagctttcaattgaacgtaaaatcaaatcttctcatatgaaaatagtacttctcattcttagttttatgaatgttaaaggatatttaggagttatcggatatctgaacgatattagataataccttattatccaacctttatagaaaagtataagtttctcaatctgttcaactttcttttttataatattttcagtagaatatagttttagtgaattttcatacaaacagaaggtgcacggttatagcaattatggggggaaatattcatagttttcaatatatacattttgaatctgaaaaatctcctttacaaattacctgactaaaaagatagaagatattgaatcaaaacatattgtcgagtataaagataataccaaaaattcgttaaatattatcaaaaagtagggtataccaatattattataggtactcattgaaatattgaaggtgatttttatcgtatacagaatatgagtaaatctatatgtaaacgtgccgtacgttttgttattagtcgtgttggaagagtatgggcagacaatacccattggattttagcatactatttatgataaagatggtgttgtttttgatagtattttcgatatcaaaagcgcaattgtttctgcaaaacgtattcaggaaaggttggatttgggttggcgtccatctgaactttcatataccataaaacaattatatcatgatatgctatctgtaattgacagggaggatttgtataatgtcaaagattaacacaagcaatttaaaacatttcgagagaattgaggaaaatgacatcctcacctatgtggctgatcataatagtatggggcatatttctgtgtttggtttttccggaactggtaaaacagaaattataacatcatcaatcaaacttttacatgaaggtgattattatagtgattatactatattgcattatgatgcctctcaactatcggaggattgcactaaagagcttttctacaatttattattatataaattattacagagaagtaattctaatgacattaaccagacatatgttacagagaataatacttttttaagttttttagagaagagttcatataaagaggaagttaaaaataatgcaaaaaaaacattaatagcttcattatcgttattacctacagtaggtccattaatatacaaattattaaatacaaatggagacaattctataaaagattatcatacaaatcaatatctttttagtgaatatttaaattatttaagtacgactactggactcatcgtatttatagataatattcaatatatacctgaagaactcataaacgaattctatgaaatatttaggcaattagaggggcatatgcttttgttcacctcttatacgcttaaacctgatatgattattactagaagattaattgaaaaatatataattgacaataatgctttggtgcttcgcattgaaaatatttcattagatgtgtttgaggagatttgtagtcaaaatctaaatcaaaaacaatattatacagtaaaagaacgtctagaatatttatatactttagtacaatatggaaatatgagagaaattgatgaacttatatttcaaattaaccaaaatggtatagactatattaatgatacacctactttgcaaggtgtaaaagcactggatgaaataaaaaaggatattatagatttagctgctttgtttcccgaaggtataaaattgtcatttattaaaagaattgtaaagtataatcatggttgtactgaaaggcagttatgccaaagcatttcaaatctatgtaaaatgaaatacatacttatcggagaaaacgatactttaagagttgaacatgaaaaaatatctcaagccagcagacaaaatttagagtatgctgaagaggaagaacgttttacagaattgatacattcatgcgaaaaggtatttgcagatatactatatgaaccgattgatgatagcgactttgttttttgtgttaatggaatcatggaattcgaaaagcaattcaattttttaaagcatttagggatattagaaaaatatattaatatactttactcgaaattcagatattttcaaatttgccaattatatagagatttatcacataatattaaagatggggataaaatagcgctactatttccaatctgttcaattattcaaattttggattccttccaaaaaactagttgtttttctgaaggattagcaattagtaagcagttatcatgcttttataatatggaactttataaagcaaagtttcttttacagtcatatcattatcaagaagctatagatgtcctaaaaaataggttaaataattatgaaagctggagtatatatttaaatgccttgcaacatttacgacgggattgtgaagtcaaagaaaacattttatcattaaatagcaatccaaatcagtattctgatattgaatattattatatcatactgagaaattctggccatctttttgagtttgacaaagcagtggctaatttgcagcaagcattggagtatttccaaagtttgaacaataaatttgtagaatccacatgcctaaataatatcggaatactatatctttataccagttataatagcgaacatatatccatagccagaaaatattttaatcaagcaaaaaaaatgtaagcgcaaaatattgctacgctgcccatgaatcacgcttgcaccaaaatgatagatgcaagcgttttgctctatgtttagttttgacagttcgctttcgcagtctcgctccatggggcaagctgttccaactgttcatctgacattttagcgtctggccgctgtgataagagatatgtcagatatttgtaggtattcaggtcattcgcttttgccatctcaaccattgtatacacaatagcgctagaggcagctcccttcgggctggcactgaacagccagtttttccggccaacagtgaatggtctgattgcattctcgctaagattattggataaactgcaatgaccgtcttccagataggtcatcagggtgtctttccgattttgggcatagttcaccgctttcgccaaacgggttcccttgtttggacgctgttgatccagccaattccagaatgcctccagtatcggcttctccttttcaagacggaactgttttctctgctccgcagtatgattttttgcttttgagtaccgctcacaatcaaacagcttggagcagaactgtactccctgcactgccggaaggctgtaatcatactctttccctttcggtatggcatctgtgaagtaacgtctcacatgtgcccagcaagagcatcgtttgatatccggcagattgttataaccctggtatccatcagtctccagatatccgctgaacccctgtaggaaagatgccgcatggaactttgcccttgtctctgtgtaatgatagagcaggatcggcggaagcccatcttctccactgcggaagagccacatccaggaatctgtttcaggattgcgctccggctcattcagtacctgaacccgggtttcatctgccatcagatatttacgcatccgtaactgacggtgaaaataatcataaacatgacagaggtaattctcggcacagtaaatgatccagttagcaagcgtagcccggcttaatgggacacccagctgcttccattccgattcctgccggtttaatggcagaccattctggtacttctggtgcattgcccatcctacaacggattccgatgcataactttctgggatcaatggttcctggacaggcgctttgacaaatgtctgatcatctgggtgttcctctgatatggcacattccgggcatttataggtttcacgatagatatttactacttttcctttggcaggggtaaagcgaaattcatggcggacgaattctttcccaatacattccatctgcgttccgcaggttggacagtttcgctcctcctccggaagagaaatgatctcgtcgcaggaaggaacatttttaaagagatctgcatgtgtccgtcgtgcttttcgcttatgttccggaacagtgatgtcatcaggaagttcctgtttccatgtcggatctgcttcctgctcggcttcatcaaaaagattcagctgaccatcgatatctttccgtttttcactggaagtaccaaaaagcttcttcgtgagatattcaatctgctgacgaaggttttctttttccagacggtctgcttccaatgttttttgtaaagactgaatcagttctgtctgtgtggaaatcgtcttattcagttggttgatcatgtccttgtacgcgaggatttttgaatcttttgaattaccagccatatgttttctgctcctttttcactgctcttattataccataaaaagcaatgaaaaagaagcagaaaacccagcatttacaagggatttcagacatgatatagggtgagaaccccctccgtttctgttggttggcatagatgttttacgcgatcattccgtaggtttgaatgcctttggttgttcgatttcaagcccggacatgagccagtcgaattgctgccaggtcaattgttttacttccaactgatttctgggccagcggaatcttccctggacttccatacgtttatacagcagcacaaatccgtcagattcccagagcaaagctttgatcctgtcacaacgttttccacagaaaagatacagggcacttcgccttggatccatatggagttgatcctctacaatagcacacagcccgtcaatggatttccgcatatccgttctgcctgttacgatatagatttcatcggcggctgtgatatcccctaacattccaactccttcacaatgcgaagcgtttgagccagaagctgaggatctgttccatttggtattgttagatgaaagcttcctacagacagcttcattggctctgctacggaaaggttatttctttccgtagctaccggaatcacatttaatggctgttcatattggagcgggtcagtatcatgaaaatccactctgacaacttcctggttttccggtgcacgatagatgcgtccggttgacgctggcaaatccacacaacctttctgacgcagcctttttacccagttgtaaaaagttcccggtttgatgtcgtgttccacacaccattgatgatctgtcaatccactttgacggcattccatgatgagacggtattgttcttcggcaggtattcttttgcttctcatgagcacacctccataaatcggatagagtaaaatgctcgcatctatcatttctggcaagagaagataaagtgaaatgcttgcattttctaatgattattatggaatgatttttagggcaacacaatccgtcgaattattttgcgcttacaaaaaaataatgcatcaactaaagtctaatgaagaatatcaatcaataattaatattggcgtaagttatgtatgtgaaaacaatcctaaactcgcattggaatattttgaattcgctcaaatgatcataccgtccagtcttacatttgatataatcaaggtaaagtgtaatattttgatttgtaaatatttgttaaataagcagactatagtatatattcgtgaggaactcttaaatttatgttccgaagcagaggagttacccgatccttggattaaactgttatgtatatacaatttatatattttacgacatgatggtatttctgatttgaatagtttgcaagattcctaccctggagatattaatctttacggtctgataataaagcatcaaaatatagaaaattttatgctaggtatttctccgcattggagatattaaaagtaataagttcggtaagttatgatttttcttgccgaacttattttttgaaacttaattaattactctatacggttttatgtaagcgcaaaatattgctacgctgcccatgaatcacgcttgcaccaaaatgatagatgcaagcgttttgctctatgtttagttttgacagttcgctttcgcagtctcgctccatggggcaagctgttccaactgttcatctgacattttagcgtctggccgctgtgataagagatatgtcagatatttgtaggtattcaggtcattcgcttttgccatctcaaccattgtatacacaatagcgctagaggcagctcccttcgggctggcactgaacagccagtttttccggccaacagtgaatggtctgattgcattctcgctaagattattggataaactgcaatgaccgtcttccagataggtcatcagggtgtctttccgattttgggcatagttcaccgctttcgccaaacgggttcccttgtttggacgctgttgatccagccaattccagaatgcctccagtatcggcttctccttttcaagacggaactgttttctctgctccgcagtatgattttttgcttttgagtaccgctcacaatcaaacagcttggagcagaactgtactccctgcactgccggaaggctgtaatcatactctttccctttcggtatggcatctgtgaagtaacgtctcacatgtgcccagcaagagcatcgtttgatatccggcagattgttataaccctggtatccatcagtctccagatatccgctgaacccctgtaggaaagatgccgcatggaactttgcccttgtctctgtgtaatgatagagcaggatcggcggaagcccatcttctccactgcggaagagccacatccaggaatctgtttcaggattgcgctccggctcattcagtacctgaacccgggtttcatctgccatcagatatttacgcatccgtaactgacggtgaaaataatcataaacatgacagaggtaattctcggcacagtaaatgatccagttagcaagcgtagcccggcttaatgggacacccagctgcttccattccgattcctgccggtttaatggcagaccattctggtacttctggtgcattgcccatcctacaacggattccgatgcataactttctgggatcaatggttcctggacaggcgctttgacaaatgtctgatcatctgggtgttcctctgatatggcacattccgggcatttataggtttcacgatagatatttactacttttcctttggcaggggtaaagcgaaattcatggcggacgaattctttcccaatacattccatctgcgttccgcaggttggacagtttcgctcctcctccggaagagaaatgatctcgtcgcaggaaggaacatttttaaagagatctgcatgtgtccgtcgtgcttttcgcttatgttccggaacagtgatgtcatcaggaagttcctgtttccatgtcggatctgcttcctgctcggcttcatcaaaaagattcagctgaccatcgatatctttccgtttttcactggaagtaccaaaaagcttcttcgtgagatattcaatctgctgacgaaggttttctttttccagacggtctgcttccaatgttttttgtaaagactgaatcagttctgtctgtgtggaaatcgtcttattcagttggttgatcatgtccttgtacgcgaggatttttgaatcttttgaattaccagccatatgttttctgctcctttttcactgctcttattataccataaaaagcaatgaaaaagaagcagaaaacccagcatttacaagggatttcagacatgatatagggtgagaaccccctccgtttctgttggttggcatagatgttttacgcgatcattccgtaggtttgaatgcctttggttgttcgatttcaagcccggacatgagccagtcgaattgctgccaggtcaattgttttacttccaactgatttctgggccagcggaatcttccctggacttccatacgtttatacagcagcacaaatccgtcagattcccagagcaaagctttgatcctgtcacaacgttttccacagaaaagatacagggcacttcgccttggatccatatggagttgatcctctacaatagcacacagcccgtcaatggatttccgcatatccgttctgcctgttacgatatagatttcatcggcggctgtgatatcccctaacattccaactccttcacaatgcgaagcgtttgagccagaagctgaggatctgttccatttggtattgttagatgaaagcttcctacagacagcttcattggctctgctacggaaaggttatttctttccgtagctaccggaatcacatttaatggctgttcatattggagcgggtcagtatcatgaaaatccactctgacaacttcctggttttccggtgcacgatagatgcgtccggttgacgctggcaaatccacacaacctttctgacgcagcctttttacccagttgtaaaaagttcccggtttgatgtcgtgttccacacaccattgatgatctgtcaatccactttgacggcattccatgatgagacggtattgttcttcggcaggtattcttttgcttctcatgagcacacctccataaatcggatagagtaaaatgctcgcatctatcatttctggcaagagaagataaagtgaaatgcttgcattttctaatgattattatggaatgatttttagggcaacacaatccgtcgaattattttgcgcttacggttttataatgtcttttgcgaatgtgatgttaatgatacgtcgctgctttattgtagaagcaattaattcagctagctggtaacagtcatcgtttgaaaaattaagagtagctaatgttaaaattccaagccgtattccagatgttatatttgctctccttttatcattgggtagttgatttcgattaactaatatatgttgccttaataacaaatcttcgccctcttttcctgaaagagaagattctctcaaatctattactactaaatgagaatcacttccgttagtatataattttaacccttgagccataaattcatcaacaaaaatttgagatatatttaaaattctattgacatattcatggatattcatggaattcaattcagcaagcataattgttttagccaaaatttcattaaatttaggtgcaccttgaacaacggggaatgtagcacgatttatttttgaaatatattcctttctacacattactattcccccacgtattccacgtgtagttttatgtgttgtaaaagtgacaaaatcagcatatccaaatggagaaatgtgattttgagcagcaatatagattgctgtatgagaaatatctgctaaaagcaatacactatacttttggcatatctcagacatttttttataatcgatagctctaggataagaactggttccggcaattaacagtttaggagaataagttttgcaaagtatttctattttatcataatctatattttctgattcatctacactatatgtatatacattgcaaaatgtttttaaatagtgcaaatgagaaacatgtcctccggcatttgtagccataactataacactatcgtctttttcaagtatggcttgataaacaatctgatttgcctgagtcccggaatacgcttctatattactatcataatcactacatttgaaaagtattcttaaccattcttcagccatattttcaagttcatcaatatcgttgcataaagggaaaaaacgattacctcgactgccttcagacggatttagattaaatggggtattcaatgcttctaatacggatggaaatgcataatttgcacttccaataagatttatatactcattcatttgagtatactcattatcaatgatagattgtattttttcaaagcggccacctaaaaaatttcttaaatgatacaattcattgcctcctcaatttattatattaataattttgaagtatgtctttatattttattgttgagttggataataaggtattatctaatatcgttcagatatccgataactcctaattatcattttaattataacaaatacttacttttttttccatatttttcttcataatctccagattagctttttaaataatacagataaatccctattttacctgtacaataaatataaccattacccaatctgctttttgtgcacacaaaaaagaccaccttaaatcaagctgatcgtaatctatagctgtaatgaattaaaagaaatatttttatgctactctaagtatattcatgtattttctgggatgcatctctcttaaaatctcagcctgcttttttgctgcaatatgaatatatatctgagtagtttttattgaactatgtcctagaatttgttgtacacaactaacatcaacgccttcttctatgagatatgtagcaaatgagtgacggaacatatggggagttatgtttctttcaatacctgctaattttgtatactttttgagcattaacctaatggaatactccgtatatctattcccccggctgtttacaaagaaaaatccacttttcttaattgcttctgaattatgtttgtaatatttttttagaatattcaaaatctcagcggaagcaatctgaatatatctttccttaccgccttttcccatgatcttgattagacctgtattcaaatttatacagtctatttttatatttgatacttcatacactctggctcctgtggcaaacaaagtttctattacagatatatctctcagccagtatttgtacatcttttcattactatttctatgctcatgcgaatacatatagttcaagagagattcaatttcttcacgcgggattattttaggtaaaattgtcgtttccttgaattttactttgatttttctaaacggattatcatcgataatttcgcactcttccaaataattataatatgctttgatggatgcaattttacgttttattgttttctgcttgtattttttatgtaattccactatatagccttctattttgcttttttctgggacatcttcctgtgcaaactcaaaaaactgtcttaaatcaattctgtatgccttcagcgtattccaatccaattctttcctatattcgcaatattcaagatacttctttacttgatctttataattcattctactgtcctccatgcctttttcggtagtgtagcatatttcttcacaagatacattcgatattccctatgtttctcattggaactaaggaattttctcttcatttcagtgcacaaaaaacgcatgcgtagaacctattctgcatctccttcatgctttactttttattgaaatagcacaacgtatctttatgacatctaaaaagcaactcaccattttgcaagcaaaacacttatggtatgtaagatactgtgatatctcctattatttgtatcatattttttgtaactgttatatataaaagacgggcagaaagctgattttactcaagctttctgcccacactcatcataaaaaaacctatattaattcatctgaatatttcgttttttcttcttcaggaatcttcaggctttccattgcctgttctactgaccaccccattgtttccataaggtttctaattgaaagaagaattcccttctcaattccttgttcaattcctttttcaattcccttctgaattcctttttcttcaacgcctttactcagattacacataataggcacctctttctaatgtctttgcgtttcagacaaaccatgcgataaggtgaacaacaataatactgctcacctctattttcaaaatttatatattttgtacttttacatttttttcaattcatctaaatacttgctcttttcttcttcaggaattttcaggccttccattgcctgttctaccgaccaccccattgtttccataaggtttctaattgaaagaagaattcctttctcaattccttgttcaattccttgttcaattccttgttcaattcccttctgaattcctttttcaatacccttctgaattcctttttcttcaacgcctttactcagattacacatagtagacacctctctttctaatgtctttgtcatttcaattgaaaaatcattctgtaatatctctttcttttcctttacttcacgatccgaagaaagcaaaacttccagtaactttaagatacctgaagcattttcatcatcagagtcccctaaacatatcataattgccgttagtaaatcataattttcttttctttccgaacaactaccaattaactgttcttctgtaatagaatatctgtttatactattttcccgatatttcggtggattcatacaaatccaaatgctatagactttctttatcttctcataatgtgcatctgaaaattcaacaccatactgcgaagatatcaatctgctgcaataataaattcctctgcttataatcgggtagcctggataaaaatcattttgcgcttcaatatttatgatcaatcgaattttttctttcgacaccggagccttcgcacaaaagcgaatatcgtatgtaaccaccccttcataaatagaagcatcttcggttgctccattttgtatttgttcttctgatacctgttcatctatatttacgggtacgtctgcaacatctgcctctccttctatatagttctctacaatttcctgaatctcacaatctctatattcctctatacaacttttcataatccatgccaagatcaccttatttgccagaaggcgtttgcatgctgcatcataggaggctttctctcctgcagaactaatattctttgccagtatattttcaactttcaacctatattcacctgcctattcctctttttcttattttatcacacacgaaaaaaagatgccacttatttttctcaccagatcatcctccttccgtatgataaggaagaattgtttatgttcttttcgcattaaaactctttctgcttttataagcagtttaccactattttcttatgccgcttcattcttatccgaaacctccgcaaatgctttttttaaccgataagataacaacgtatttctttttttggatcttcccgcccgtattgcctgggaaaatgcctgtttgcttcccacaagaatgacttttctttttgcccttgtaattgcggtataatatagatttcgctttaaggtatgccgccgaaaacatgacaaaatcggaatgatgactaccggatactcggagccttgtcccttatgtgcagtaattgcatacgcatgaacaaggttccaagattctccttcctgatatcgcataacccgctcttctccaaaatctacttccatatatttcttaccgctcacctttcctatttttcgtacaatcccgatatctccgttggaaatttcatcttcatttttcgtctgcatcactttattctgtatacgaaaaattttgtttccatttttgatttcctgttgtcctctctggtaaggattgattctgtctttgatttttagattcaaagcatttgcgcttaccttcgtatcttcccttaaaggtgttaatacctgaactgcatttacatttttcccttgcaacttccactccatatcaaaaagtttcataatctttttcgcggcttcttcatcatcatgtgctgctacaaaggaaaaactgttatcatataccagattttgtttgccacagttgatttttatcgcattctccaaaatagtagggttttcctgccggaaacattgatctaaaacagtaactggaatgactctggagtcaatgagttctttaaatacatttccaggccctactgattccagctggtctttgtctcccacaaaaacaatccgacttccggtctttattttcatcatcagacttgtaaacagatgcatatctaccatgctgcactcatcaatgatgatcaaatcatcgcaaagcatttctccagcattccatgctccttcaccttctgctcctgtaagtccgatacttttatgtatcgtcagtgccggataccccgttgcttcatacattctctgtcgcgctcttccggtaggtgctgccaataaaatcatactatccatattcaatttttcctggatcataacaataaaacgcagcagggttgttttcccacttccaggtcctcctgttataatggaaattgaattttgaaaaaccatttcaatcccttttctttgcttttccgctaattttatgtgttctttggcttccaaattggaaatccatttctctacatcatacctctttatcggatacttgcttagcgtggcaagttgtataacagccttttgttctgactcataatttttcttagaataaatctttgtataactacagattagttctttatcatgtttgatcagagaattgccagcatcacgaattttccgttctgttacactgccttttttatctccacgcaccaacaacggcttggctcttgttaaaatgtcagacacctctaaatagagatgcccttccccttctgcttcttttaaaacatataatatagctgcttttattcgtaaaggattatctgcctgaaaatgttttactttccttgctatcggatccactgttttaaatccaaacccttctatctcacacaaccggaatggatcctttttaataatgttgactgccttgtgtccaaaatgttcctggattttttctatcttctttggtgttactcccgcagaagacagaaaaattgaaagctgacggatattttcactttgataatagccatctaaaatctgctccagttttttttgtgtaattccaggaatttcaagcaatcgttccgggcattcttcaaaaacatagaaggtatttttcccaaatcgttctacaaccctttctgcgataacaggcccaattcctttcaccaatcctgaagaaaggtacgcttttaccccctcttctgttgtcggcatttgaatttggaaagatgccacatgatactgttttccatatttctctgattctttccactgtccttttaaagagataccaatcccttcgtttctgggcaattcacagccaactgccacaaactgcctttttccaattccattcttcccttcaggaatgttctcctctgtttcatatactgccacagtatatccgttttcctgattataataaatggaagaagcatatctgcactctaacaagtcactacctccttgtaatccacatataacgaccagaaatttttacagagtaaccgccttctttttccaactcctttttgatgagtattcttttatctgccggaaaatcccgaattgcagcaactctgcgaaatcctttctctgttcggatagtacataatccgtctttcccaatagaaaatgaatagataccttctgccgccagtttcttcgaaatacgaagaaatttttctcttccttctccaagataccatttttttgctgctatgtctgcttcattccactgctcttggggaacatcaagaattgtttctgtcttcttttcagtttctatcgccttttctatttgctgttttgctttctgataaatgggtgcttccttcttttctggcacctcttccgtcactgttactttcggtttatctctttccttatgctccgtgaaggtttctcccttcacttctttgggcttctttttcaaatgacagaccaacagatacaccaacaaaaccggcactgtaagggataatgtattgactagaattgcaagaaaaaagggccataagaacggagctaacaaaaatcctgcaatgcccgacacaatgcaaaagttttgatactttttcacaaaatatttccacttaccactcataacagtaccatttcctttctctgcgaggatttttagtcaaatccataattgttatattctgattcttgtacacgctcaaattcttcgtccaccaggtttctttttttattttcattccttcttctttccggaacactttttctcgactgctgatttctcctttccggctgttctcttttcctttgctctgactttttcctggaactaggtttctttatcctgctatttcttctacggggatcagagtttccttttttctgactgcttttccttatacttcgatgatatccatcttcttcgtcatcttcttcgtcctcctcttcttcgtcatcctcttctagatattcctcctcatagtcgtcatcttcgtcgtcctcataatcatcctcatcataaaattcgtcatcgtaatcctcttcttcctcatcttcgtaatcgttctcatcttcgtcctttcgcttgcggagtaattcgattttatcaagatttatcttatctgtatacatcgtcattccatcctcattttcataattatcatttaaaaggattccctctattccaacgcaatctcctttttcaatatactcctctataaattctgcactcttatcaaatgcagagcaggaaaaataatcatattttgttccgtctttcgttttaaaaggacgctttacagacaatcggaaacttgcaactaatccgtatttcgatgcccttttgtttctgcgcctcttccttttaaattcatttacttccggatcttttacaacgtatccggtcattattactttattcatgctctttctctcctttttaaagtaggcaggaaattattttcctgcctgataggtataaaaaaagacacttagaatttccattcaaaatgtcttattctatatacgcattgtttctaaatcatactgaaaatcagatccaatacatcttacaatcttttttaaaatctcataaaaattcaggctgtcttcctgtatcggtcttataccttttacataatttggccaaaaacaatattcgtaaaatcgtttcacctgcatagaaggtgaaataaaaatcccctgaaattcattttgcattttctttgtagttccttcttcggaaaataattttagatgtagtgcctcacttttgcctttcttgtccatctgaagccagactgtatgatcggcaagacgaatactgctgtgcagcatatagatgtcttctccgttccggcaccagataatttctccgcaaagtccgttttcaaactgcgacgtaatacacactccattttccggaatatccgaaaagcagatctcatcatcaaccaccggaattgtcctttttacacccttggaaacgcccacatcttttcgacattcttcaaacatctgctttgtactttcataatttttgttctgttcatactcatagtttttcatcctgcttcctcctgttctttaattatttcttttcagtgatgttttgtgtatttcttcatattttgcttcatatctgcgatacccttccagatcataatactttaatcgttccggatagaaacgaactttctcataagtacaatatccatttctgctgatttctcctgtcacttctcctaatccgctttctgaaatccaggacaaaatttttcttccatgatggttcgtatctacataggtacagtccttttcgcacacctcatgcaaatcaacggtcagggttgcccatggtgaaggatatcggtatttccagttcaccatttcaatttctaaatttccggtgtaggaatatccttttactattagctgtatcggaaatttttctccaaaagcttcatagaagaccgttttgggttcttcctgttttctgaagttgtcataatcttcatcactataacctgaccagaaaaaagtaagcgcaaaatattgctacgctgcccatgaatcacgcttgcaccaaaatgatagatgcaagcgttttgctctatgtttagttttgacagttcgctttcgcagtctcgctccatggggcaagctgttccaactgttcatctgacattttagcgtctggccgctgtgataagagatatgtcagatatttgtaggtattcaggtcattcgcttttgccatctcaaccattgtatacacaatagcgctagaggcagctcccttcgggctggcactgaacagccagtttttccggccaacagtgaatggtctgattgcattctcgctaagattattggataaactgcaatgaccgtcttccagataggtcatcagggtgtctttccgattttgggcatagttcaccgctttcgccaaacgggttcccttgtttggacgctgttgatccagccaattccagaatgcctccagtatcggcttctccttttcaagacggaactgttttctctgctccgcagtatgattttttgcttttgagtaccgctcacaatcaaacagcttggagcagaactgtactccctgcactgccggaaggctgtaatcatactctttccctttcggtatggcatctgtgaagtaacgtctcacatgtgcccagcaagagcatcgtttgatatccggcagattgttataaccctggtatccatcagtctccagatatccgctgaacccctgtaggaaagatgccgcatggaactttgcccttgtctctgtgtaatgatagagcaggatcggcggaagcccatcttctccactgcggaagagccacatccaggaatctgtttcaggattgcgctccggctcattcagtacctgaacccgggtttcatctgccatcagatatttacgcatccgtaactgacggtgaaaataatcataaacatgacagaggtaattctcggcacagtaaatgatccagttagcaagcgtagcccggcttaatgggacacccagctgcttccattccgattcctgccggtttaatggcagaccattctggtacttctggtgcattgcccatcctacaacggattccgatgcataactttctgggatcaatggttcctggacaggcgctttgacaaatgtctgatcatctgggtgttcctctgatatggcacattccgggcatttataggtttcacgatagatatttactacttttcctttggcaggggtaaagcgaaattcatggcggacgaattctttcccaatacattccatctgcgttccgcaggttggacagtttcgctcctcctccggaagagaaatgatctcgtcgcaggaaggaacatttttaaagagatctgcatgtgtccgtcgtgcttttcgcttatgttccggaacagtgatgtcatcaggaagttcctgtttccatgtcggatctgcttcctgctcggcttcatcaaaaagattcagctgaccatcgatatctttccgtttttcactggaagtaccaaaaagcttcttcgtgagatattcaatctgctgacgaaggttttctttttccagacggtctgcttccaatgttttttgtaaagactgaatcagttctgtctgtgtggaaatcgtcttattcagttggttgatcatgtccttgtacgcgaggatttttgaatcttttgaattaccagccatatgttttctgctcctttttcactgctcttattataccataaaaagcaatgaaaaagaagcagaaaacccagcatttacaagggatttcagacatgatatagggtgagaaccccctccgtttctgttggttggcatagatgttttacgcgatcattccgtaggtttgaatgcctttggttgttcgatttcaagcccggacatgagccagtcgaattgctgccaggtcaattgttttacttccaactgatttctgggccagcggaatcttccctggacttccatacgtttatacagcagcacaaatccgtcagattcccagagcaaagctttgatcctgtcacaacgttttccacagaaaagatacagggcacttcgccttggatccatatggagttgatcctctacaatagcacacagcccgtcaatggatttccgcatatccgttctgcctgttacgatatagatttcatcggcggctgtgatatcccctaacattccaactccttcacaatgcgaagcgtttgagccagaagctgaggatctgttccatttggtattgttagatgaaagcttcctacagacagcttcattggctctgctacggaaaggttatttctttccgtagctaccggaatcacatttaatggctgttcatattggagcgggtcagtatcatgaaaatccactctgacaacttcctggttttccggtgcacgatagatgcgtccggttgacgctggcaaatccacacaacctttctgacgcagcctttttacccagttgtaaaaagttcccggtttgatgtcgtgttccacacaccattgatgatctgtcaatccactttgacggcattccatgatgagacggtattgttcttcggcaggtattcttttgcttctcatgagcacacctccataaatcggatagagtaaaatgctcgcatctatcatttctggcaagagaagataaagtgaaatgcttgcattttctaatgattattatggaatgatttttagggcaacacaatccgtcgaattattttgcgcttacaaaaaaatagttccagtctggcattggcggacaatatccttctaactgttctgcacctgtttgttttaatggtatcagattttttttaccttccttcacagccagaagcaatggttttaacttctcttccaggtacattcgatctgggcaaatatcaatccacttcccttttattgttgtaagaaagcgtttcccatccaatgttctgatttctgaacgttctgcagatagactattctttaagaagctgattatattattttctgttgcccgaaaaataattgcatcttttccacacatctcactgtgaattccttttaagtactcttggttcatgattttcctcctatttttctttcttttgtggcttaactctatcctcctttttcgttgattgaaataaaaaaaggcacctagaatatttttcattctaaatgcctaataattctttatttcttattgaaacagccacctgtttccaaaatctgtttccgattctttatcggaaaaaatttttgtactcatctttgatttttatgagtataaatgttaattcattttcactctaacataagatattgtatgtgtcaatatctaagtaatttaacaatttactacgttatgtttattactctgatacaacttttgaaaagatttcccaacgtccttttacattttcacctttgtccgtacttcttccacaatattccagatattttgtctgattatcataattttcaaaaaagtctttcagccataacagataactattttctttttcttcatctccgtacactacatccattgctgcaactaccattggaatggataactttttcatcttatccattttatccacaatcttttcatctaacttgtcaagaacctccaaggcatgtccaatcaaacggatactttcctcagaatcactattcaatatttcaacatacttttcaatattcttttgatcaaaagcagtatattcgtatccagaaataagcattagtatttggcaggctactttacgcatattatctgatctgatatcaccttttgtaattccagtctttgcccaaaatggatgctccataattttataaagttctgtactaatgtcaagatttaaaaggcctgtcagcatctgtgctccgttcaatcgctttccactattcaaacgcacaaacatatcccgtacttctttttctgtgcagtcccacatttcaaaaatcaagacttctgcattcaatagtttgtcttgtacaatctcatctaattgagaaaaccttttacctgcaatttcataagtttccccatcaatcataaccggatcaagtttcttagaaagtggaaatttgtcccctttatatttctgtagggtagtaatcctctgctttccttctatcacatagtttttattgtcttttttccaaatataaactaaattgatagaatatcctcttagcagcgaatccacttccaacgattccatataccgggtccactgtccctcctttctctgaaaaggatgagaaaaatcaagctttccttttccggactcccgcaacaatgatgatacaattttagtcttacatgtagattccattttccaacaccactccttaacttttttatcattctatcacgatataccgtacattgcaaacgcctcaaaaattaaaatatctgcttaacttcctatttttaccacagatacaatagttatctattatctatccactgtgtagttctttcaacaattgccttcttctgttcaaaatgtaaatagtgagaaccttctagcaaaattacttctccattttctttatctgctataatatccctatgtaattgttcccactgtggcatagtcttgcaattctcttttgaaacattttgcagcaatgcataggattcataattgggtttttgaaagagcaagcaaaaagaaccttttattattgcctttacaaagcttatacagataatgtccattcaaggtgtttcacagactttctgtacagtgcattactttcactcaaaaatctaactgttatctaatccctttgttataaaagtaaatacgattgacagattagaatatctgccaatcgtatttgcttttataactattgcttcatttcttcccaatcgtaataccacttccatttggacatctcatttaacttttgctcatataactcatctgtaacaggacattcaagatagtcaagtgctcccgctgacagtacctcaaactgatcagaaatactactgttttctaaaagtgcaagaataggaatgttacttttgcattttgcttctaaaattattttaaattcttttgtagttaccatagcacattcaaaattaattactaatatatcgcactctatagcctctgcatccttaaatgcctcaaaagatagtaattgcagttcattttgatctttcatcagtttttgagtttgataataaatgtccaaagtattgctaaccaaaagaactttcacgttttgttatcctcctatggttttctgtcatttttatctttcctaaaagcatagatataataattattccaagcgtgtatgtgattgtgcgcaaataactattacaaccttttataaatagaaatatgattatccctaatataatcgctataatttgttttattctatatgcaaacaatttcttttcatgtttgtctactgggcgatttatattttccacagggttcatgaaaaatataatcaaaagttcaaaagtagaaatactcagtgcccatatatctgtcaattgaatattatcaacagctaaaagtattagtataaatactatacacgaacaaacaaaacattttctgtaattgctcatatgaataccaccaacaaacgatcttaatgagaaaaaaaccaaaaaaaatacaagacattcttgaagcatgttcatttgtgttgctatacagcaacaagttgcaatatagataatcatttctatgccggtccaaaaaccatatttatatatctctgaatcgtccttttgaatgaccttattttccacaatgtaatttgttagtgaatctgcaattttttctgtactaatcatttttaagtcgcttcatttcttttggcattttcggttgatgataaatacatacacacctactatttaccgctattacactaaatagcattgcaaagcttgccataacttttgcgcttttttgaataaagaaactaatttttttcattatctttacctccattttgttttttattagtatacctcaaaaaaagtttttccttgctataatgtaatttctacgaagttccttgtaacttttgcgataaatcgcacaaaactatttttatagtaaatttttgtgtatcaggttcgataacaactgaaccatgatatttcctggtaactttctttactgattccaatccaataccatggtttcccgaatcccctttgtttgtaataatttttccacttctattttttaataattctccattatacgcatttatggctgttattattaaagtatttccttcgtacttcataaagaactttatatatcttctttcttgatctaacatcattgatgcttcaatagcattgtcaagaatatttcctaataagatacataaatccgcacttctaaatggtaattgcattggtatatgaatatctatttcaaatttaatctgttcttttattgccacagcatatttagcgtttaccaaagaatcaacaacaatattatccgttcttgaaattccaagtttacttaaaggctctatatttatgagctttctcaaatattctatagccttctgattatcctctttagcaagtaattcaatcaaaacaataaagtgttgtttcatatcatgtcttgcattgcgaaactccatcataacagtttctttttcacgcatatgttgattacacaactctaactgttgagcatataccgtattgtatttttgcaactctttttcttttgacaaaattaaatagagtttaaatgtaacaatattaataagcaaaattataattaaacttgtccatgattcgctaatatatattttctgatttatttctatgctaagcataaaaatattgtagactacaaacatactccctataggtatcagcaacaagatgaaattatacttatttggaagattcttgatattctcatcatgaaaaaatttctgtagacacacaatcaaaattagtgctactaatttagataacaacgaaccccaaaattgaggaatcatataatctattccacatagaacaaatccatatcctaccagaaactctgccagcatccaaatggcgttaattaagacagaaaatacaaatttctgtaaaatattcccttcaaatacacctatgcagactatgctaactaaaataatactaattatgacatttatgtatgctggaagtatattaatacttccaataattaactgccagataaaatataatgcccaacaaaagcatcctacaatcttacgatctttcttgataaaaaagatttcaaaatacttttttaaaataaacagagaaaatatagccaaagtagtgtctgcaattagagcattaccataattaaacaataatatcctctccttttaacatacaaaaaagttcacttactttttttcttctattttcactaatagatagtgtagtcccatcaaccagttccattgagtcataaaaatatgcagctacatatttaggattcactaaaaaagactgatgtgttctatagaaatatgtatcagcttctaccagacgtctttcaatatcatttagttttccataacattttttacttccatcatttgtgataatgtaggtaaccctacgatcactctgaaaatatagaatatcctcaatcggcaatctgtatgatattttattatactgatactgaaaatactttggtcgtcttacaatctcagtttctgcatctttaaaatactttttgaaaatttgtggttctattggttttgtaatgaacctaaatgcggaaacttcaaaaacttctttggcaaagctttcatgacttgtaacataaataattagtacttttttatccatctttcgaatattcctagctgcatctattccgttttgtttggccatttcaatatcaagatagataatatcatatctttttccacgttctatatgctccactaaactactgccatcataaaaaacatctacttctattttcgtaacgctctcttctgtaacttcctccagcattttctcaatctgagcagtcactaaagtttcatcatcacatattgcaatttctaacatgcctttcacccttagtaaatcaatcttctttgttacctttcgctaagtttattgcatactttatcaattgttcaaggttatatctctgttcactcggacatccttcaacaatatccttcaaagaaatttcatttcttttgttccccgttagcaaataattaatatccatatcaaatttagaattgactattacaagtttttcaagtgacagaccatatactcctctttcaacttttccataatatgcaagactcatctctaaagtttctgccatttgctcctgcgtgtagtccagctcaaaacgcaacattcttagtctttttcctatatccacgtataacgctttaggtgaagcattttttacttttttatttttgtgtatatcctctttaaattccatagctcacctctgtaaataatcatatatatctatatcatacacatataaaagcgacttattaacacatgaatgcgacctattttaagaatatatgcgacttgtttaggttcttttttgatagtatgacactgaatacagcactagtctttctcaattatttaatttttaaacctattaatctattaaaaaacattattttagtaaccaatattgtaaaaaggcggtactaaagtcaatcttcagcaccaccttcgtttctacgtcaatcattcagccatacaaatggtgtgttttcttgataaatcacatcatatatataatctgccatttgttcttcagataagctcgaatgagcaagtcctatttctcttccaacactattattatgtagatccatattcttatgttctagcttagtgtgaccatccgattctacgcctgttgtatctttttcttcatgtgcagtcgcaaatagttccgctttttctgcacctattagaattgtcatttctgcattccagataccatgcctaaacgcatcacttcgatctcctaatccattatgtccaaactttctttcagtctgtcttgtagctatgttcttggcatcattaactttcagagcagcaaacggatatttaatcagtaacttcttttctgtttcagtcaaagcattccaaatatccgtaattcctcttgcttcttttctatcattttctaaaattgttgaaataatatcagaaatttcctgttctgattttcccggattagcattcttgatatccaataccatttcaaccaatttctccatttcagaagaggtaataatctgttcacttattaccatttgtggttcttctgcgtaaactgctatcgtattacccaataccatcatacatgcacagcataatactgttgctttaaaaaagctatatttcatctttttacctcactttcactttatatcttctcggaatcttcagttattgttttccagggcttacagagtccatattttaaaaatcactcactttttatcaaaaagtacttgacaaatcaaaagaactttgtaatgaagccagttgatgatatattatttcaattaactggaggtgatttttatatttccgctaatcctagtagatgcacctcctatcagaacacttttcgtatttgattctttttaattttatctgtatctttttctctccttaagagcacttgggattataccgtgcagttttatatcctaatctttctttaatagtttctatcctgcatgaacgttattctgtcttcggactaaagccaagactgttttcctgtatgctacattcctatctgcttctgtaggatacacaaacaagagtgagaaaacaaaccataaattagaagatgataagcaccgctctgtaaaaagatggtactgcctcctctgcagtatcatgtagttgcaacatcttgatgcttgagtaatgccatcagccgatgtgttttaaaatcattattagtttttgccacttgtttatatccatttttcttaactttcttttctgcacgatattcaattgtcaattttcaagtgtaatttcatttattgagattccgataagttattttttacactatatcatcttttatgccctaaaattttcccatgtaattattcggctattttatgtaacttttccttcaaaaaaagctgcatacgatttctcttttttgagcaattgcatatgtgttccttggtaaacctgtccattttttatataaataacctcatctacataatcaatcatgctcaacttgtgagtagaaataagtacagtcttttcttctaaaattccttgatttccaatcaatgccttcataattttgtcttcatctaccacatcaatattactagtcgcctcatctaagaggtatgtatctgcctctttgatcaaacatctcgcaaggcaaatcctctgttcctgtcctctggacaaattctttccctttgcaatttcggttccccagttttgtggctgtcgacctactacatcatcaagaccgatcgcctggcttatctgaattaacctctcatttgtgcatgtctgtccaaaaagaacgttttctaatatactaccatccaaaatggttgtatcctgatctaaataaataggtttttctctacattgctcatcaaatacaacttcaccctgataatcatttaagagatttgctaagattttaagcattgtagatttaccgcttcctgaaactcctacaacagcatattttttccccttttcaattcttatattaaccttctccagacattgcaaacttccgtaatgataggacatatctttgacttgaatcgccatattgccatcaagttttgcaaattttcgttcattgtcctgcataaagtcatcatctaacaactctgttgctttatctacattaggtaaaactgtgtaaaccgaattacaagcttgcccaatcactactacattttgtactactaggtataacaatggaagaagtgccatttgactaaaaatattaatttcttcattacacgcaatactcagtatactcactgcgatcggaacaatatatgtaaatacattagttaaaacattctgaaagctttgaataacaactaatcctccatagctctctgcctgttgctgattttcttcatgccactttttagtaaaaatcgagctaacacccaaaacttttatggttgaaactgatcgtatgatattctcacttgttgtatttaactgtataattttttgcgtatatttgttgctttccatatatgctattttgcttgttcctatgtatacgactaaatataaaataattgctcctaaaaataatatacccagaagaatattttgtactagcaacaaaatctgaacaaaaataattgtgcatagcgaaatgaaagaaggtaccaactttaacaacagtgcatctttaatcattcctcgtgcgtttatcctatacaacaaatcaccattgcttctaaaggaaaaaaatttgtaatttttactcatcagtttgtcaactagcctgtttccatatatctgctcatacaaaatattaaattttttagtcaatacaccttgcatgatacttcctatccctagtaaaataactgccccacatagtaatagcatgactttcttatatgcttcaccattcccaaccatggaatacatataagaataactcattgctacaacctgtgtaaaaactgaggttacaagtaaaccagccaaaatccgaaacaatcttttatctgataagaaacttagcaacccttttctggttaatttctcagattttatccccgcatctactcttttgatttttacaattacaccactatatatcttctgaaattcatcaaaagaatacttaattcgtccaattgctggatctactccggcaaagtgatttttactcattttatcaagaacaataaaatgaccattctttacataagcaatgactggcattattgtctggttgaggctctgtatatcaatcttatatccttccactgaaaacccatattctcccaatgcttcttttaactgcaatatattgcttccagccatagataattctatcttctcaatcaatttatatactggtaccttgcatccaagcgtattcataatcatagcagcacatgccagtaaacagtccgattgattagtttgtaaaataactttcactaatatcaccacactttcttacacagtttcaagcattaaaacagagtacaactttgaatttttacttctattttctgtatattgaatgcctgcttctccaaccataaatcctattgagtttatagctcctggtgctccaacacaactgtagccgttttctttaccattctcaataatttcccctatatatgtgtctattctttcatcggttcccaaaatttttctataagaaataagaaaatcgatcaaagcaaaatttccatggcataaagagtaatttttagattgaaattttttatttagaagttcttccttatatttagacaatatttcttttaaattttcttcttctatatctttagcaaattttttatcaaaccccaattttatccaaatcaatcttgccatcataatgcctactgaaccatgacaccagtaatgtgaatgtacgatatgatgagttcgcatatctttccatataaatttttcaacatgcaattttttttcttctttccacagttcacataaaattttttctaattttacatcagatgtatgctgaagcatacacataattgatgtcataactcctgaatacccatgtgcaaaacttgcataattaaaatttcttttcatatcatcaattttaaaactatttaaaaaataatcttctatagatgataaaatttctctagaaaatgcgtcttgtttacaacacccaaaataataaataactgctgaatgaattcctgccaaagtatcatagctgctagttttaacaatattatttcttattacttcttcaatatttcttatatatttttctgtgatatccggctcaattatatttcggtctttaatttgtttcaagaacgcataaattcctgttaatccgcaaaaataggaaatatcatattctttaaaaatacctaaatcatatgattttgccagcgtacaaaatattctttgtatcatatcttttgccaatacatcttgctctttatcatattcggaaatatacatatatccaattcctatgattccagagtataaagaccaatctagcatagcatattctaactgttctttatcatttaccataagtccaagccagctaatggttccatctgaacctataatgcaattccggtcaatattgctccgaagcattttttttacatgaatatccctatattgcttcatacttattttcaacttttcatattcaatacctaatgctatattagaagcaatagcatcatatattaactgtttctgtttttttaacatttgtatattgacctgatattcaagaatttctgataatctctcttttgtaaaaatagaaagatccaatatcttttttttctgtcccgaattcaaaccatatacacaattcatatccatcttccaataaaaactaggtatattactacgacaaagttcagtaacttcctgttcatatacctcaggattaaattgattgctcctttttaaagttgttaacaaatgtccaaataattctggatcataacgatatcttggatcacttttaatccgaacgatttttgaataaccttttgtcatattcaaaataattcgcgactcaactttctccatgttattcaaaatataatttatgatttctacctttttctcaccaaaattattttctgcttcctcaaatccttgcacaatctgttttccatacatcaaaggatcaattttatgatttggcaaatgtttatgctctactatcatctctggtgcagtgcaaatatacatatcatctctatactcattttgaattttttctacgatcaactttattcctttatttgataaacaactcacatctccaccaaaataatcagtcatagaaaaaattggcagcattcctgtcgccattgtaccgtagagcaattcttttacagctttatactgtgcatcataaaagaatgtatgtgtatcaaaaaataagtatgaagaaaaaattgtttccacatctgtaattaccgggtattccccacaggcaataagattttcataatgaatgtcattcattcctaaaatatatgcgacaaataacacttttccgtaattataataaaactgctccacttttcttggatttgttagttcgatatgcttaacaaactttacccaagtaccttcccgaatacacaaacctatgtattgttcggcatatgccggttcaaaaaaataatccataagccctttcataaattgtaaattttctcctcgggttggtttgtatacaattttatcttgagatttgaatgtaaagattaagacacattcactatcgtgccaatctccactattttgcacttgtacgatttcttccgggttaattccaaaatatctaccaattttattcttgttattttcaagttcgtcaattacttccattacatatacacatttatgtgccatctcatcgtatatttgatcttttattgttggaaaattcttacccatcgcctctatacagtatctcgtattactgaacatttcataacgttcttcagaagtatttccatatagatttccatctaacctttctacattcatacaatataacagcgatttaaaaactctttgaaaaatctccttttcaataatttcttttacatattcaattttttcactatcaaaatgataatcctctttctcttttaatgtctctatgatgtattcaaaaatatattcaatataaagaccacaaaactttttatgcatacttacctcctgtaatatttattttgaattcctcatatattattcaatacatcataatgtattttgaggaaatctccttttataacttataacaacaggctactcagaataacctaagcagcctgtacagtaaatcttattcgagcattaatattaaaattgtaattaacagcatgtaaaattagcagcatgtaaacaagaactgccatgtattcatattgcattcgtggctaatcgtttttaacacaccattgccaccacctaagatctgctccagttctttttcttccattgggtttgttaatgttaatacatcatttctcatatcatttaccctccttttttagcaacaagtaaacaggaactgccatgtgttcatattgcattcgtggctgattgtctttaacacaccattgccgccacctaagatctgctccagttctttctcttccattgggtttgttaatgttaatacgtcatttctcatatcatttatcctccttttttagcagcaagtaaacaggaactgccatgtgttcatattgcattcgtggctgattgtctttaacacaccattgccgccacctaagatctgttccaattctttttcttccattgggtttgttaatgttaatacatcatttctcatgtttttctctcctttcttttctcgaataagattatggtaatatactatcatggatttctcttgatatttctgccttgtaaaattccccctatctccatgtaatatttaccatctttctaaattttcccaaataaaaaggcagttcacaacctgaaactgcctttttatttatctattttttattggaacactaattggaagaaaaatagtagtagcatatcccctattaggttcactatcaatttttatctttccttcatgtgctattattatttgtcttacaataatcaaccccaacccatggcgtaaatctaaacgctcgtctgtactctccatatagtgaggaatttcttgtaattcccgtaaccttttttcagataatccaaccccgttatcttttatttgcaattcaaacccatgttctacataatctaatctaattacaatttcacagccctttgggttatgtcggatactattctgtaccaagttgcctattgctcgtgttataaggcgttcgtcacaatctatcaaaaactgttctacagatgaagaaacttcaagaataatagaatatttttcaggaataccttcatttaataattcagccacataactacgtaacaaaaccgaaaatcgaacctttgttttttttaacggttgcatagaatattctaactgtgataccaaattcagatcttgcactaattcttttattttcatactctgcttgctgataattactgcttcgttatgaattaaactttctccctctgtttcatctgaaatccgttgtgcatatcccattatcatagaaagaggtgttcgtatatcgtgagaaactccacttatccaatttgctctggcttgattttgcctatctaaaataattgccgctcgatttaccccttctgcaatttctgccagttcaccatcaacagaaattgaaacagattttccatctgaaaggcttttaattgcagcgattattggttctgtagtttttacaatttttctctttgataagaaatatgctataaataaaagaaatatatccaaagaaaacataattaaaataaaaataggtagttttcttatcgcatcaagagaaaaatagttacttgtaatcttcatataactatcttttggataccctaaaactataatcccgccctcacattcccaagtaaaaactggatagtcctggatatatccttttgcaaatactgcaacatcttttatcttataagtattcggaaccttcttaggcttattgtacgaccacgttactactccatcttcattaagaaaaaaggcccaaatattgttacggcttaatttttctgcaactttgcttgaaatgtctgttccatcaaaagaagaagctgtttcttctagcatagtccgcggtgactctgaaccataatctttatgcatgatattataaaatgtccatccaaacattatactattcaaaaatatcaagacaaaaatcaatcccaaaaaaacagacagctgtttcgatatatatatcctaaacgatttcattattttacttccttgtatttaatttgtaaccaagtccttttattgtaatcaacgatacaggttttgatggatccacttcgatcttttctcgaattcttcgaatatgtgcatttaaactattctcaaatccaaatggattatccccccacaatgcttcacacaaaacgtctacagtaacaatctttccttcatttctagcaagtgtttccaataaaatatgttccttagctgttaaagcgagaatttcgccatttttatttatttctgcacgtccgaaatctataatacatccatctaatgaaactgttagtgcctcgcctttataacatcgccttaaaactgcatacgtgcggaacaacagctcctgtggcataaatggtttcactatatagtcatctgcacctaaccccaaaccagacaatttagcagtagcttcatctttcgcagtcaaaaaaatcactggtacgtctgtaaacttccgtaattgctgcattaaactgaagccgtctccatcaggcaacataacatcaagaaaaatcaaatccggtttttcgctgtgcgcttttgaaactgcttcttgtacagtacttgccatcacaatataattaaatccatcatcagacaaaatagttgttaacattgttaatagttctggttcatcatctaccagtaacaactttttgctttttaaatatgaattgtccatattaactacctcctatctatgcgcctattataacacagtttcttatttcttgatcactttttacaaaaagtaaggtaaaagtaaggatacgagaaagtaaatgttaggtttgtagtgtaccatatgattaacgaaaggagatgtttatatggaatacattataacaacagaaaagttgacgaaaaaatataaaaactttacttctgtcaacaaagtttcacttcatatcaaaaaggggagcatttatggctttctcggaccaaatggtgcaggaaaatcaaccactatgaaaatgcttttaggactaactgctccaacaagcggaagtttccaaattgatggaaaacaatttccaaatgatcggcttgctattttgaaggaaattggatccttcattgaagctccatccttttacgctaacctaacaggtagagaaaatctcgatataattcgcagaatattgggattgccccaaaataccgttgaagatgctttagatttagttggattaagtgagtttggtgatcgactggcaaaaaaatactcattaggcatgaaacaacgtttaggattagccggtgcattactcggaagaccacctattttgattttggatgaaccgactaacggtttagatccttctggcatccacgagattcgtaatttaataaagtgtcttcctaccttttatgattgtactgttttaatttcttctcatatgctttctgaaattgaactgattgctgacgatattgggattcttaaccatggaagaatgctttttgaaggtagtttagatgatttaaaacaaaatgctttgcagtctggatttgctactgacaatctggaagatatgtttctttccatgattgaaaacgacaatatttccagaaagaagagggctcaattatgaaaacacttatgattgaactgcgtaaagctaaaagaactggcgtaataccaattcttttagctatgggggttcttggagctgcttacgcttttcttaatttcataattagaaaggatacgttattaagcttgccgctagctccaatggacatattattaacacaactctatggaatgctcatggttttaaacatgtttggaattattgttgcaacatgcatgatttataatatggaatttaagggcgaagcaatcaagaaaatgtatatgctacctataaatgtgtcttccatgtatctttgcaagtttgttatcttgactgggttactcctaattgctgtcttaatgcaaaaccttgcactactaaaaataggcattactgatttacctgtaggaacatttaacttgaatgtgctaattgtattcaccggatattcctttattacatccatgccagtactctcattcatgttattaatttcttcccattttgaaaatatgtggatttctctcgggataggcgttggtggcttcctaagtggaatggcaatagccaattccaaattcacattatttatggttcatccatttgtattaatgttaaaaccagctgttgcacttaatgcctcacctaatcctactgtcataatcttctctttaatagaaactttcactttcctcggagttggactatggcttaccaaaaatcatcattatgaataggagggtcaaacaaatgaatttctcagaattactaaaaatcgaatttatgaaagtcaagcgctctaaaattattccacttatttttatcgctcctatcttggtaattatttctggaattgcaaacctaagtacttatttcactccggaatacacaaatgcctggccagctatgtttatccaaagtgctcttgtttatgcctactatctgcttccttttagtatgatcgtagtttgtgtaatgattgccggacgcgaaacacaaaacaacggtattttgaaaatgttggctttacctgtcagcaggcaatccctttctctggccaaattttgtgttcttgttttttacctctttatggaaatggctgttttcatggctgtttttattattgcaggtcttattgcaacaaccactatgggaattaccgaaacgctaccagtactatacctactcaaatggtgtattggactttttcttactatgcttccatgtgtagcaactatgtgggcaattactgttttatttgaaaagccattactttccgttggtttaaatctattacttgtaattcctggtatcttagttgcaaatacaccactatggattgcttatccttactgttacagcggatatctcgtatcctgttcattacatgactttactgcggtttcttctgattccgcatttgaacttatgccattcttgccatgtgcaataattgtatttgtacttgttttaactgtatctattaaaacctttggaaaaaaagaaatgaggtaattaagtatgaaagaaaaaaagctcaaagttcttagtatatgtgcattagtttttagtctgctccctcttgcaacacttattccaacattccttggtgtcacactcgcaaatggaatacaaactgcatgggcaggtgcaaatatcttatttgttctagtcggtttaatactctctattatttgtgtgcgtcatgctggaaacaggaaagcattaaacattctttcaacaataatcagtattttctggttattgttaatggtcggaattatcgcattcgcagtattactaacttttaaatcgtaatgccaacctgtttctctgaaactattattacactaggaggtgcattttttgaaaaaaatgcttcttatagatgataatatcaactttttaaaactactgtccaatttgcttcagagaaaatttgaggtatatatggcaactggcgtaaaagaagcaatgcaaatttttgaatcaatttatatagatatgatttgttctgactattttatgaccgatggaacgggatttgatatcttaaaaaaggtaaattctctaaatatcgctattcctttcattattctgtctgggctcgaagattcaacacttattcaaaaagtagagtcataccatgcgatgttctattgtaaaacaaatcctgaatcgctatcaaaactctgtgatattggatattctgaataaaataattttaaccttcaatgtaggagatgcgtcaacaaaaacatacccagaatataaagaaaagaggcttttatgaacagtaaaaccagctcagactgtcaaacaatgaccaaagttactttatatatttcatcacacagcctccttcatctgtttgtctcgcaactaacatcataaagaaaaactgtatgattgggaagtagggattttctctacttcctttttgcatacaacccttttatctttcctaccaatccttcacgctaaaatttcttgaaaaccaaagacactcttgatactctcatacctcacccactgtccatgatagtaaatagcgcatattttaataattttaaggctctaaccgcgcatcataatagtccgaatgctttttagcactacaggtagataaaagaaactccttctccggttccggttctgcttcatgtccttcttccgttatcttatacactgcactatttgtcgacacttgttcacaggctgtaatcttatagttcaatattactccttctggtaaataaacctccatatccgtatgctcctgaaaaaatcaatatcctgataatttctcaatacactaaacatacttccatctttcatgttatgcccagagataatattcttactatctgaaagatcccattcattccgataatccccaaaatactgctagcaatattgtaagtattttgcgccgcatgacttaaataacaggaattatcttcccctcttacgactggatattccagtacccctggaattctgacccatgctacaacatctggattgctttcctgtaaagctgcaaaatcaaccattacggtttcttccggcttttcttttccttatcatctgttgtagtttacggcttcatatcttctggttcttttgtattcttttctactttcacatattcttgcaactgttcatattcctgttctcttttttgtattcactcataatctaatcaatccagattcctgctgccaggaagatcacggttaatatcccaagtaaaaaaaagcggcagcataccaaaactgatatactaccgcctacacttatgtctcttactttcttaaaatgcaacaatccactgagttgggattgatatgctacttccaatatttataatgttctgtggaatcttcacagaccttcaacggaacctgaagaaattccaccccaaatttatttaccagtagcccatttaagtaatcaaaattcaaatattcttcaatcagaggacttagtcgtaaagtaacatcaaaaccctcttcctgtagtttaaacaatgcccttaaccgctttgacggactgcttacttttcatattcaagagccttttatcatcaaagcaggtaatcgtaatctggatatgtgccagtctcagatcataaagttttcggtatcgttcttctccttccataatatttaattattctagttcccataccatgacctctaatcccactagtgtaaagatatattgatattcttttaaaatcataatagttatctgcttcctatccactgtgtagttctttcaacaattgccttcttctgttcaaaatgtaaatagtgagaaccttctagcaaaattacttttccattttctttatctgctataatatccctatgtagttgttcccactgtggcatagtcttgcaattctcttttgaaacaaattccaatactggtatttctttcggaattttcatatcttctactacttccatattcttttcaagactcttcatctctgccataaccgttgcgttatatcctttatccagtgttaatatacggaaaagatccagttccttctctgaatatggatatctgaaatctgcataaacaatttttttcggattgtttatagaaataagtcttgtaatcccagttatatttattgttttttgaatatatgcagacatttggttaataaactgaatgcttaccggaaagggattgttctctttctttgtcattttcggaacagatggatcaattcctataatccccctgatttcttcaggatatatctggctccaatataaactatataatcctgatatggaatgacccataagataatactcttcttcacccaaattctttacgcattcatgcaattcttctacaatattttcaattgtccgttcacgctttgttccatcagataatccatatccaaagggctcaaccgtaatcaccttgtactttttagataactcacttgctaaaggtctgaattctaaaataggggatggttctcccaaacctggcagcaagataatcggcggaccgtcatgctcctctcctacaatctccacaaccatactttttccgtctatttgcacgctgtttccatacgcatttttcgttttggcttcatcttttttcttacaaatagtattccatataatccccaataaaataattataatgataatacctataatccattttataacgatccatatttttttcttcctcttcatttaaaaattcaaactccctcccgtaatggtaattgtcccggcagatttattggttacataaaatttataatatcccgtacttccaattgtaaatgtggtactatgatttttccctgttccactgtactttttcattttcacaccacttagatttttataccctaactctacacttcctgatgttttcagattaattgaaaagctgattttagcctcgcccggaacataaaatgcctgaccatcattatcgataatattaaccgtttcccctgcactcaatgttgtgctggatattcccattcttgcatttggttgatatataacattttgctgctcctgtgctgcctgtacaggaacattacttgtcatcatacatgatagagttatcaccactatcatcttttttatttttttcattgtcttccatctcctttactatgtgataattcaggataatgcgatcactggatatatttttaaaatatggaaaatattctttccgctctcctcctttcagccagacttcagattcttctgcctcaataatatccagtttaaatggctttccattttctatatatcctatttcaaatgtatgtccaacttgatttcccatgttttcctggctaacacttattttaaccatttcattatcctctaaaaaaattccttttccattttcctgtataatcagcattgttccattttccaaatatattagctgattttccttataaaactctgtatctatttctaaaatatgctttgcaataggaatctcttcttgatacagataagcgttatcaatcaattctgtttgaatatctatttctatatttcctttttctgtatctttttcataaaaggtatgttctttttccaggctttctgttttctctactttcccgcctggagacaaaatagtttttgctagaacaataccgccagttaccaaacatatactaccggctgctgtcactgcttttaaaaaataagaatatttttttctgcgaataatctttttatataccttgtccttaatgtctgtaaggttaccgatatcctcttcttcttttgttataatctcaaccgaattatccaacatctcactaatctttatcttcataaaccttatacccctccctacgcaaagcattacgcaaagtttctctgcctcttcgaagtctggtttttatggtctgcggattcatattaagttgtaatgcaatttcttctatcttcaaataattgtaatagtataaaagaaagatttcctggtctatcggctttaattgctggaaaagtttctgaataattctctgctgttctttttgttccataatcttttctgactggttatcaatcaaaactacatcatcatatagttccagatcccaatgtttgattgcacgtatcttatctttcgctttgtttcttgtaatcatacctatatatgccttaatactggtgtatttttcataatcaattctttcagcagtattccataatgagataaatacatctgatactacttcttccacatcttcgtttgtaccttttccagcaagtatttcttttgaaatcgtagtgacgtatgcattatatctgttcatgatttcctctaaagccttttcattttttctctgtagttgttttaataactttctttccttcattcgtaagaatcctgattttttttgtatcaatacgtagaattcacaattcaggtttcaaaaaagatgagatattttataatatttttttcaaagattatttatttttcaatctatcttaacaacacttttgaataaaaaaataagaagacttaacagcctccttattctttattattctatttgctatgtaaatacatctctatgctgttcgtgcaagatttgcattcgcatttcgggttactgttccattactgccacaataaccaacacaatatgctggtcctgcattatgagcatttgctactgctacagatccactgcaaatacaacctgctttacttccttcaaaatgcgatcctgttttcattgtttttgtttttactaatttcatgctttatcttcctttccttgttatgatgttcgtgccagattagcgtttgcatttctagttactgttccattattgccacaataaccaacacaatatgctggtcctgcatcatgagcatttgctactgctatagatccactacaaatgcaacccgctttatttccttcaaaattggaacctactgcgatctttttagactgtactaatctcatgttttcccctccttcctctgtaactttttattttaaatccttcaaaatagatttaaaattcttattttgcttcacaatgtatagtatatacatacttcgtatgattttttcgtcttttctgtgtagtttttgtgtagaaacctattttctcatatttgttattatattctccttggcaaacaatttcttaatgtcataaatgtctttttgaatatttctttcttcttttgaaagcatatccttaaaagtaaaagcatttataaaatattctctcaaagagttacaattataacctattggttcttcctttaaaaacttcaaatatctcttttctatctccgttactggcaaattttctatttctctacaaatgtctttccattctaaactctcttctatcgttaccttaataaattcctgcttaggagataaaaatattttttccacaccaaccttacctacattttctttcaaaaattcttgtattacataaagtaaatcttcatttattgactcagcatccgattttctctccctatataaatagtatgatgcattaccctgttgatttttgatggcaaatccacctgtttccgcataagacaaaatcttttcttcaatcttcccatgctctccactaagatttgcaatccatccgtctccaatgttctccaacgtttgtgttgatgtaatccaaataatacatacattttctagaaaataaaatcttttaaaaaatgttctgatttcgtcatttgatatggaacgaatcgtttttggggttcctatggataaatggttttcataattagttccatttaataatatacgaaaatctgagtttctatttttcacttcatatgctttatattcctcaagaatatctgatcttaccttctcaacatctttcatttctaaatacttaccttttaaaatattctgtatgatatctattacacactctaacgatgtatcctttacatcaaaataataggttgttgaataaaaatccgtataggctgaacaaagatacctcttctcatttttatcaaaaaaattcatttgtacatgctccaaaaagtgtgcaattcctgcattttctatatcttctgaagaagaacctacattgattgttagcgctatatagttcattccttgaaggttttctagtggaaacacacattttgttatttgattttcacattttgaaaaaaaattattctctcccaacccagtcactcctctctataagcctctgcttgtatgctataaagctttgcatattctccgtctaatttcatcaaatctctgtgattccctttctctataattttcccatcctgtaaaactaaaatttcatctgctaattttactgtagaaaatctatgtgcaattaatatgcttgtccttccttccattaaatccctaaattgtttataaatctcatattctgccttaggatctaatgaggctgttggctcatctaacactacaagtggaaaatccttcataaaaattctactgattgcaattttttgccattgccctagagataattggatccctccactccattctctgtgtaactgtgtatcatacttttccggcaaggaagaaataaattctgctgcccctgctttctctgccgcacagtaaatttgatcaatatttttcatttcttccacatttccacaaccaatattctctctaactgtcaatggatatttcacaaaatcttgaaagactgcccctatcattgtttgataagattctgtatcaatatcacatatattaactccatcaattaaaatttcccccttatctggaacatataactttaataacaacttaattatagtggtcttgccagatccatttaatcccacaatagaataacagtgtttagcatttattgtgaaagaaataccttttaatatatatttttctgattcaggatatcgaaaccatacatttttaaattctatcttttgaaaatttttattaaacgataacgagttctctatcctttccgttgttttcatatctaaaaattcaaataggttttgtatataaagaccatcttcaaaaattgtgactattgtatttaatattgtcgtagctgaacctctaaaattatcaatggaatttatataaagagaaaaatctccaagggttcttttctctaaaataacctttaaagtaatatatattttaaaaaataagattgcaacctcttctaccaaatctgtcaaggataattttttgcagaaactacttctgatttttttatcttcttgaatatatccatcatattgtttcagtatgtgcccccgaaaaaaatcatgtacatgataaattttcatttcctttatattttcataatcagttacaatatctttcaaatatgctataaagcgtaatccttcaaatcgcttagtataaatttcatattgtgtaactgccatcttcatactaacaattaacgttggtatgcaaataaaaatacacaatagcataattccaacattaagacttgctaacactgtgatggttccaatcaagctgctaaaactttgaatgaagtttgttaatgtcgccaataaactgatggatctccctgtcgattcttcattgactttcctaattttgtcataaatcattgaactgtcaaaatactttaaatccgtatcttttacctttttcaaaatcaaatcacttgtataacgatttaagtaacttgataaaatattctgttgataatcttttattctcatcagtacactctgcaaataattgaatataaaatagaatattaaccaaaataagaccggtgcaatgtttcctgaaacaattgatcgactcatatcatcaataagatatttccaaataaccaaagtaaatgggatcgtaatacctgaaacaatactcactatcattgttttaataaaattggacttcgagctattccataataaccgaactactctgcttattatcaaaaaaaattctttgctttttttgattaaactctttaatcttttcataaactttcactccacttacttttataaaaggagaccgtacctacttgacagtctccttcttttcttataacataatattaagccttttaactctgttcatatatctattttatagaatttgcttaggtattgaacagagttatttttctttttcagactgacatgttctgtttaaagtacatcttctatgcagttcttgcaagatctgcattggcatttcttgtcaccactccactgttgccacaatatcccacacaatatgccggtcctgcataatgagaatttgccactgctacagtaccattacaaatacatccagccctatttccttcaaagtctgttcctgtttttgttgtttttgtttctactaatttcataatccaatacctcctactagtttttttttgcaagattataattcgcatttcttgttactgctccatggtgttatcgggcacactataacaaactgatcttccacttttcaggcaaaataaaagaggtcttggcataaaggaatctgacgtattttccatcagattgttttatcctgagacctcttgtgttatcatatggttttgtaaccatgaaattaagaaagcagaaacctcccctaccaaagtttagtttctgccttcacctaaacatagctctcgctacattcatacatacctatgataacagttaaaacagaaaactacaaccttatttctcaggatttttacaataaaacaatggattcccttgatctgaaccttatttcatgtacctgtggacactccggctgtctcatccgtcatggctcttataaacgcagcatccagcttgctgacaggatcctatccctttccgttgtccgtgtgtactgcaaaatctgcggacatacccatgcattactactttcatccatggtcccgtattcccagatccccctggctctgcacgtccgtctgattcaggcttatgaacatgaaaccggattccggaacatactggaagaacaatacctcgtggatgaaaacaacctgaaatccatcatccggaactaccgcttacactggaagcagcggctgctctccatgaggcttcacctccccgatatccccagcctgatttcaggatgcttttccctcttttccagacagttcatgcagattaaatcaacctccaataaactttttatcctgccaacataaccttacacgacaggtctggttttatcccttatcctttagaaaaaggaggcagatgaaatctatgaaacaagaaaaacaacaggaaatcgcactaatgcgctatggcgccatcgcaccgatgattgcaggacttgatgaacgttatccaagcaagactgctttttacacagaaatctctgcaaaaggcctgatgggacccgacgggaagctccatcattatgctcccgccaccattgaaaagtggtatctagactatcagaaccatggttttgaaggtctcgtcccgaaagggcggtcagatgccggcatgagtcgcaagcttgatgaagaacttcaggagaggatccggtatttcaagaccaactacccccgcatgtctgcagccgctatttacaggcagctgaaatccgatggctccgtaataaacggacaggtatccgaatccaccgtcagccgttttgtgaaccggcttcagttagaacttcggcagaccccgaacagggatatgcgccgctatgaacgcccccatatcaatgaagtctggtgcggggacagcagcgtcggtccccgccttacagattcggatggcaaaaaacaccgggtctatatcattgccctgattgatgatgccagccgcttcattaccggaattgatgtgttctatcatgataactttatcaacctgatgtcggttatgaaatcagccatagcaaagtatgggcgcccaaaagttttcaactttgacaatggtaaatcttacaaaaacaggcagatggaactccttgccgcaagaatcggtacaacactcagttactgccagccatacactcccaccggaaaagccaagattgaacgctggttccggacgatgaaggatcagtggatggcagcccttgatatgcgggatttccattcactggaagaactaaggggaagtctgtacgcttttgtccaacaatacaaccaatctccccattcttccctccgtggacggtccccacaggaccgtttcttttcggaatcggagcagatccgcagactttctgaggaagacatccgtcaaaatttccttctggagcttgaacgccgggtatctgctgacagtgtaatcgtcatcgaccagattgaatacgaagttgattatcgttttgcacggcagcgtatccgcctgcgctattctccgaatatgaaagaaatcttcattgtggaagctgacgggacgctgacacccatccggcttctcaataaaaccgaaaacgcattgataaaaagagaaaaagtacgcttatgcaaaggagacgaatgattatggattacactgcaagatacggattggagttcaatcctttcctaaagaactcaaaggaagtcctcgtagaaacacaggaatacaaggaggttctgttccgcctgaactacctgcttaccacaaaaggcttcggtctcctgaccggaagcgccggaagaggaaagaccaccgccgtcaggaactgggcttcaggactgaacacttccctttataaagtggtttactccagtctttctaccctgactgtaaatgatttttaccggaatcttgccgctgaacttggagcccagcctgcattccgcaagaccgataacttcaagatcatccaggatgaaatcaaccgtctcgtacttgagaaacgacagacgcctgtcatcatcatagatgaagcgaactatatcggaaacgctgtactcaatgatttaaaaatgctgttcaactttgaaatggattccaaagaccgggctgttgttcttctttccggtctgccacagctcaacagcaccctgcgtctaagcatccacgaacctttccgccagagaattgtcatgaattataacctggaaggcatgacaaaagcagaagggcattcctatgttgctgccaaactgaatggcgccggatgcacacaaacggtattcgaagacaatgcactggaagcaatcctcaatgcagcgaatggaaccccacgtatgatcaacaaactgtgtaatgcaagtctgttggttggaaacagctcaaatttaaatatcataaccgccgatgccgtcatgcaggcgatcaatgactgtgaactgggatagctttagaaaccatcatgtaagataatctacatgatggttttttctcataaaataacgtgcctgaagcgtccaaaaatatatgcttcattccatcgttaggtgctccgaaagacccgttttaatctgacggaaaaggcagcgtttaatttgccgaataacaccatggtttccacagtatcctacgcaatatgctggtcctgcataatgagagcttgctactgctgcgcttccactacaaacacatccacttctgctgccttcaaagtctgctcctgtctgtaactttcctgctacgatttttctcatgcccaacgcctcctttctgtctgtttttttattttaaattatctttgataatctaaaatctttccttaataatacggtaccgcatctatctcttcgatcacttctggtttctcttccagaactgaaccactataatgctgtaatacgagatcaattctccttttgtggcatacctatgggctccgcagaccttctcttttctttccatatcaattccttctgtttcatagcaggctgcataacaaagtccacacaggtttcttgcccagcattcattgcatcttgcgatggatttttcatcgtattcatccatataatatttctttattttttctagatctgccccttcaaacacgtttcctatatccggtgcatctccggtcttttcacacaaaaggaatttcccatctgtcttgacatagaccctccggttccctggaatgcagcagccgtttcttctgaggtctttgcatggttcctgtgtctgtcttcggttatgtatccgcaccagtttatccgctacaatccctgccacataactttttggatcctcttcttctaaatcccttgccagtgcccagccttcgatggcatctaacgtgaaaccgtccagttcctctccgataaactccccatctccagcatacttcatggaaatatcttcttctcttacgcttccgtattctacgtaatcacatttctttaccatttcttttggcagccagctcagtccttcaaaaaactccttgattgcatccagtttctttgcactgaacggcggacagaccactgtattgatcacaatactttcctttgccctctctccaaaggcttctaccagatattttaatccctgtattgctttctcaaaacttccttttcctccgctcatcactctgtaagcatcatggattccttctggtccgtctatacttgccaggacactcattccttccactcctgccacatatgcagcgatttccggtgttaccagtgtcaggttcgtggagaaagaaaaggtcagttcttttccttttatgatctgccggctgtaatctattgtctttttcatcagttcaaactgcaccagtggctctcctccataaaaggatatcgccactttagctccactgttatcccttgcatactccacagcacgttttgccacttcccaagtcatagcttttggcgagaaattccggtacccttcattatgttcgttataaatacagtagcggcatctcatgttgcactgttctgtcagttccaggatgacctgctgcagatcgtaccggagcaagtcccttaatgtttcatctgtttcccttacaaactttaaattcggtgaaacctgcaggatatgctctgcttctaccatctcccagatatttctgtacgcagcctccagttcttcttcagaagctccttccacctcatccggaagatttgtctgctcgaagaggctttttaagatctggtattcatttgccccgcactcaaacacttttccggttcctgtatcatacatatactgtttatttctggtagtgaaaacagttcccaggctgtatccatgctctacatcaatggtctctttgatctttttcaaatgttctttcattttttctcctctcaaaaatattcttacttctaatatttcctatcaatttcatgtggtttttattaactttgtaatgtatagtttaaagcagttttttatgattttcttgttgttcttgtatgttttttgtgtagattgtaccaactgcatttattttagagccaaaaaacatccgcctgtaatcacaaacggatgtttctctattctttacatactattttcacttctatcccttgattagtatttttaaagtcacactcataatgatgtaattctacaatcatttttacaatataaagacctaaaccacttcctcctgcctttctatttctagatttttctcgtctataaaatgcatcaaatagttttgggatctcctgttctgaaatatgttcagcattattctcaactgaaaatattacaccttcttcatttttatacaccttacaccaaatatttccattatccggcgtatactttacggcattgctaattaaattaccaattactttctgaaacagtactctgtccgcacaaatttctgttttctcttctatttctgtatgcaaggtcacacctctatctgtcgcaatatcttcccattcttgtataattccttttacgatactgtctaaagatatagtcgaaaaattgagtaagaaacctgcagatttcattctggaaacatctaatatctcttgaattaatccttccattgaaaaaactacctcgtatgatcttttcaaatatttatcccgatccttatatccaccaattcctgaaatcattccctgaatttgacctttcaatatggtaacgggggtttttagttcgtgtgaaactgccgcaaaaaaagagagttgtttccgttccatttcttgttctctttgtatttcatcttgtaatatttgatttttctctttcaattcttgtaatgtatcttctaagtgctctgccaattgatttaagttttcccctaaaatgcctatctcatcgcttcttttttcaggatatggtttacggaaatctaattttaccattctttttgatgcctcatttacctttagaattggtctcgtaatataacgggcaaaaaataaggcaattaaaatagagactatcaccgtaataactcccaaagacggtaaaattctatttagaacttttagtcctatattaaccgactcctttgttccaaatatttgaagtttataaactgtaccttcattagactttacaatataattttttgtaattcctttactattttgtgccttggaactattcgcatctggagctaaaaaataagatatttccccataatttcctatttcctctccttcttgatttttcacaatgatagatattccatactctatcgcaaatcgttccaaggtcttctgagtttcctcatttgtcatattacttatttgttcaattgtggtatctaattctttctcaaggcttttatttaattccgtcaaataaaaattagacataccaaaagtaatcattccataaattgctgcacttaatgtcaataatagcatgatcgttactaaaaacactttgatcgttaagtgttctttaatgtactttctcaagacgatatcccactcctcttactgtttctatataatttccaaaagcgcctaatttctttcttaaatttttaatatgattatctaccgcacgttcatcaccataaaattcatatttccataaccgatttagaaagctctctcttgaaattactgctcccggatgttccattagttcttttaatatctcatattccttttgtgtcagatcaatgctttctccctttataattacccgataattaccaatgataaggcagatttcacgataccacatttcattattttctgtttcatcttttttatcatatcttctaaatatcgcttctatttttttaatcataagtggtaaagaaatcggtttcgggatataatcatctatttgcaattcaaatcccttaatttgatctgcttcgctacttaatgcactgatcataataattgggacgtttgaattttgccggataatttcacatacagcatatccatccatcttaggtaacataatatccaaaagtaccatatccggatgttctttgttaaaaactgccaccccttctacaccatcttctgcaacacatacttgatagttttggtcttctaaaaaaaattgtatcatttcttgtatatctaaatcatcttctacaatcaaaattttcttcataatatcatctcctaaataattctattttatcatcttactttgtaatttgtgtgtagttttcatatcttctggtcctttttcattcttttttcacctaagaacttccaatccaaaaggcagcagtatatcaaaactaatatactgccgcccacacgttcctatttacttaaatcccagcaatcctataactctacatttatatgctgttttcaaaagacataatattttgtaacgtcttcaaaagtattcaataacacacgccttttttattactcaatagactttatactcttggtgtcactttcatttcattcgtgttttcttttggccatattatttcttgttcctttggaagaaattgcttcattatcttttctattttagactcttctgcataaaaaaatagttttattcttttcagcagaaacctccttcaattctggaaaaatcttaaaaatttctgcatcagaagaaatatccgccaagtgcatttgcattgcgtaaatattgaaattgtgataatatacaaccttcatagaaggaagattatttgctgccagaaattcttctgtaatggattctgttccttcatttttatataataaatgatttttttcaaaatccatttctgaaacttcacctataattttttcaatatccacattaattataattccgatttttggcaaaggctctccagaacttttcctatacccgattttttctaaaacaacgcagacacaatttttttgctgatataaacatggtattatctgttcttctgcaatctgataatcctgaagatactttgaacagttcctctatctatatcataaaacaaaagtttacaggtttctaattctgtatatcgttcaatgtaggttttgaattcattttgagtttcgatttcaatatctacaacatactttcctggaaatacaaagggaaccacatctctatctacatccataggcataaaataggaccattcgctattttcattgtaactattccattcttgtccagtcttctttgtagagcagcccgacagcagaaaagcaaacacaagagtcaatgctataaattttattctattttttaacattttttcttatcttttctctgtaactcaatctgatgtttcatcagttctaaagtctgttccactaatttttcagaaggattattcttatccattctttctttatatttttctacccagttctctgtattctccatcactatcaccttcccatctaattaacatcatagtacacatatccgttttcatcttttgcatttttcaaaactcttgccatttcaaacaaaagtccaaacgtatatgtgaatggttctgaattattttttaaattctcaatatttactattttattcgtttctacactcacatatttttttccatcaaatctatatctttcaagaacttcagaaatatcaataaccgtatttacaattatttctccttcatcatagataatagccgcattcacagaatgatttccattatcaacgactaccagacctaatggttctattaaaactgcctgaatattatatgcaaacgaaatcccattaaagggattcttatttatctctcccagtcctatcaatccgtcaatcatacgagaatgattccaaacacatgatataataggagtattttgaacctttaaacgtatgttacatttttgccaaaaatcaaacgacaaatccagtaaaaaactattcaaaatagctctcatataatctatttccggataattcctatcattatacatacatttcgtaagtaattcactttgtatagaatttgccataaatttaattaccgaacgcacagattcctttttaccttcatttaccaattttttaaaatcttcgatgaatatctgtgtattctcctcaatcgtaacctcttgttgttttttcttctgtttttttaaaaacatactacctcctgttacattgtttattactttttttatattatatcggaaaattttactgtttacacatatcatttataagttgtattttttcgataggaatattgtatatcctagaaaattcattaatggtccaattattatagactagaaaacttctagttacatatacatcggaatttgattccttaattaagtgataaatactcaatttgtcatgacaattaaaactataagaaggcgtgctcttcaaatttccatttgttattttcttatcatattgttcttttatattcttcacttcgtttatataaactgttatattgcttatatattcctttcttccttttttctttgtataaaaatatggttcagttaaaccaatattatagattcctcttggtgtagttgaaagtgtaaaaatcagcgtattaatatctttatatagtatgtttttttttctaacaccataaaccaatttttgttctaataatctatatcgccgttgactaagaaagcaataaaaaataaaaagaagtacaattagactgcctataaaaaatattatttttttaggatatattttaaaatcaaatgaaaaaataagttcacttaaacaaaaagaaaataatatacatataattattcctgatataaaatcaaacaaattggaaaatttactacctcccatgatataatcataacttttattcattatagcaccctcccatcgttatatctaaaaggaaattgtctaatattccaaaaaaattattcaactggtcaccaaatcttttcgtgtagtttaccattaactcttcaagaatattttcattcaatgtgccagcctgtatcaatcctcctggaagactgcataccattcctagtaatgctgattttatactatcttctccaatctgacctaaatttttatagttatatccatctatcctatctaagccttctgtaacaaaagtccccaatccattagccataccaccaacaatatttccaacaggccccagtttactactcaaaccaccctgaatggcaccacttatagcccctcctataaatccgttcgcaaaatttccgccatttttaatattaataacaccatttactgttcctcctattgctgctccagaagcaacccccattaaaactattcccgcaacaccactcgtagagattgctgcaactgcaattccagcaattaccaaacttgtcccaacaaccttaataatatcctctttatgttctactatccattttccaactgcctttcctgtgttccaaactttttgaatccctttattgattgcatttcctacatctttaattgcattcttaataccctttccgatatcacttaaacttggccatgcaccatccaagtctaccaatatcattggtgtattaaagcagtaactgtaacggttcatgctgaacggcagatccataaaaccagcaatcaaatcctgtcctgcaaaccttccattttccgtcagatattccctcgcctgtgcataatacgtccctgcgatctcatccctttggtatcccgtatatccaaacgtctgtatctccccttggttctgatacagatcttccccaaaggctccgtatccatacctctctttgattgttccaacgctgtcctcaatccgaagcgggcttcccagttcatcctgaaggtaatagttcctttccccattttcttcatacgctgccacgttcccatcccagaagtatctctggctttggttttcctctgtccgctccagaaggttataatactgtctggtcaggtccagcgtataggcaatctgccggctgtttccgatttccatgccgatcctgctttgcggatccagtttctccagtttttcctttggtatagtgccttcctgctttcctacccggtgtcccagtccgttgtactgatatcttgcctgttttcccgccgcatccaccgcttcttctaggcggttcattgcaccgtagatatactgcttcttccatgccccgttttcctggatgcccgttaagtttcctctcttatcataactgtatgctctcaggatctctccatgtttttcgcttaccatctggttcagggcattgtactggtagaaggttctttctcctttctcctctttccatgtccggtttccaaaggcatcatacccataccggatctgcatctgcccatccttttggatttctgaaagtctgcccaggacgtcatagccataacggtaactgccactttcttcggttaagccacgccactcttttgtaatgctggtcttgtttcccagccagtcttatatctctgtcaattgtctaagcgagttctaaataagtcattttacaaacctcccagcaaatactcccactatcataaattggttaataataagatcagctggtttttttgataaaataatacctatttctaatgtaaatgcaataattaaaatgaaactatacactatttttcttactttttctaattttttatatcctaaaattttcagcaatactttaaaaaatatcaagaatacactaaaatgttagtgatttcatgagctgtcaccagattgctcacatcagttgacgctcacttgcttaactttctgtcaccagtcagttaggcaataccgcctgtttccaggcggtacctgctttatgaagttaccatcccaagcatctcgtgttccacaacgaacttgatcatataatcatcgatcaatcgtttctgattttgaaacgcatacatcaaagctttttcacagacacggttgatcatccgtgggattcctgcagatgccttatggatctcatccaatgccttggttgtaaatatttcctgcccgcatccggagtaatccatgtggcttgcgatatattgttctgtttcagaacggtcaagatgaggcagcgtacagtacatgtcaatgcgctgccggatggcggcataccgctgtagctttagtttattttcccacagttctgtctgcccaactaaaacaagcgccatgggactcatggaatcaaaccggtaattgagcaaaaagcggaattcttccagcgtctccttctctaacaggtgggcttcatccaggatgcagacaacttttttacgctgtacgccccggattacctcgatctcctgttgcagctgacgctttgaatcaccgcggtagaaacgggattccagccccaactgatccagcaaacctttatagaaccaccttggggtcagttttgagtctgacagataaaggatgatgtaatcctcttttggaagttccgaataaaaccggcggataagcgttgactttccacaccctgaatcagctgttacaacagcaaacatctggcggtccgccacataagccagacgaccgagagtttcccggaaagcattggattcaaacagtttttcgggagggacgtcccggacaaagggggtatgttccatgccaaagaatgattcatacattagccattcacctccttcctgtaggaagcaaatgaaatcgcatctgccatttggcgcctgctctgggtatgcttcgtttccaaagcatccagaaaacgggaagttgtcggtttttgttcctgcatagcagctgggagcgtagcgtgtctatcgcaatacgccccaatctttacaggcattgcctgaaaaggttcaaatccgggatgagaaatggtgatgatctcaggatttgccggatcataggagatttctaccgtatacccgatcaaggccggcttggtttcatacctttgcccgcggaaactgatacaggcacctttatccactttcctctgctcatgatgcaggaaagcttcggctacaacggctgtatccaaaaaagtcagtgggcggctgtcccggttccattcctgaagcggtgagatcccttcttccggaacggcagcgccaaggctttcatagtattctgcgatgccatcatgctttttcttgtggtaatactcatccagatagatggcccataggcggttcagttcctccagtgttttgatgtttttcagctttgattcccggataaaagcatctactacctgatggaacttctcgatcttccctttgcttttaccggatcttggttttgcatacatcacacggatgcccaaccttgcaagggaagaccggatctgttttgcgatatactgtgtcccattatcaaagtaacaggcatcgaaggttccataccgggaaaccgcctgatggaacgtatcttcaatgattgcttcttcctgattatcatagaaccgggaagataaaaggtatctggagtggtcatcgattgccgaggacaggtaagtctgtaccttggctccatttcttccaatcggaagcttgggaccatacttgatatccgcctggatcagcatcatgcggtgtggtttgcagaaacgtttggaagaactgttccttgcatcctggtacatctgcatctgcttttggccgtaaccggccttgtagatatggcgttccaaagtagaacgctttaaagcaccgggtgctgcaagcccttccgtttccaggatgtagatgatctgggcaaccgaccgctcgggaacctccttgcgtagctggattgcctgctccaacagaaactcaaagttttcagggagtttttgtgagcggtgtttctcccggtcagccggctttagccctgtaaactgcctttccgaaaacgctttttcataacggtaaagggaacggaccgatatatgattctcctctgcaatctttttgcgcagctggatccgttttgcatcatccagatcagcctggagaagcggagaaatcaattggaaacgcctgagggcttcttcttcctgccattgttgtttgtttattcttgtattcataaaatagtgacctccttttgagaccactatacccgttggtaccgcgacagacgatgcaaagtaggtgcataagccttaccagcagatcgggactaaaaatcccccgctgttgtaaatctgacgcaagatgatttctaaccagttttgatattggtttctgaaagaatcgagcagtgaaccaagggaaatcctctcttcgttataacccagcaggaactccctgatcgtccttaaatatccgttgatacgttcaagattttcgcagaaccattgcagccagcggagcatggtagcgcaggacgggtagtcttcagaatctaagtcttccggctgtacaacgccatccagcaccccggagatcacttctgtttcgtaatgcttgtacggaacaagacaatccggaagttcattatgataagagtggcagttcttacaataaaaccgccgaatgatcaactgatcttttaaaccgccttcctttctacggatgcgtgggcgtgaatcccggtaacgaagcgtagcctgacagatggggcacatatgggtggtcacactgctctcaacaaaaaacaccaaaatcctccttgaggacaagtgaataatctgatataataaccatggtttagtgaccagggtctcagagtacacaacttgctaggagggtgctctgagaccttttcctttttgtatgctgatgacagtatacaggtcaattcagagacaggcaagtaaatcagtattttgataatttatgaggtcaacaacaccgataattgtaccgataataaatataattgttcattacaatcctgtttttctttatctatttctttatatacattataaattgattgaaaaagatttctttgcttattatttggatcccagaaatttccccattcattatacatagattctggcttacttgcataaataaaactatctattttactatgaggcaaaatctgctttttatttataagctccttgcattcaccacttggcttacctttattataatcatttatagaatcgtatcttttaactacagtacggcgaccacattttccatctgaaaattctacactaatacttgcaccttcattctcagaagcatatcgattttttaagacatttccctcatatcttgtaatattgtttttcaaatctttttgtaataaatgaatttcaccagtaaaaaaccactcaaacccatcaaatagagatgttttcccaaatccgtttttgccatatatacatataaagtctgccggctgattgtttgaattattaaaactaatttctcgctttcctgaaaaaaccctaaaattttctaaagtgatcttacttatttttttcatttatttcctcctgagcacaccttttaatatatttttttagttctgttataaaattcaaatcattaagatttgttataaaatccattccttctataaaacaaggttgatcactggtttccttttcaatttgcaaatcaaatagttttgagtttataatttgttctagattttttttattcttaggcatttctgattgcaaaacaatttttctagaagaaaatttattttgctcaatattatatattaaattcccttttatattaggttgaaaaaaaacaatatatatattataaatttctattaaatcacttaaacctttttgaattacatctgacacattgtttgttaattctttccaatttgcttttagtgaattcacatcagaaaattcgcaacaaacaatgtgtataaaatagtcttcggtttttcgtttcatatatataattttacatttttcatctaaaatgttatcttttaaacttgttatatcctcaatataagtataatccttcatttttctaattccttaatataatcagcaaatttttcatctaattgttgcgtatttccacttctaagcatactgataatttcatcaatatgtataattgcttttggcttgggatctttaaaaatacttgttatatccaactcattccctggtatacgtgtaatatctcctaaaacactttcatattccaaatatgtacactttttctgattatctcttggtttctgctccgatccccatataatgatacagccatcctctaatctatgtgctatttctttttccgattttagtgcataaataaaatgacttaattttaattgtgcttgtgtatttctcccttttccttcactacaaataaaatatataggtatctctttaggaactgtaattttaggcatcttcaagtcaacatttttgtttattgcatttaagaaaacagcaagtaccaataagaaacctctaaaatagacacactgataataacttgtgctatatctacattcgtcacagaaatcataaaaagttcctttaatagcttctgccatatcttcttcaactactttatcaagcaaaaatagcatctttggcaaatcattttcgcctaagtcttctactatttcttctttgaaatattctaattgatctgacaaatttccatttattttgtttattaattctggaatatcatacttcttttcgcaacacatcatcctaacaaaatcagatgttgttcccatcaaatttcctcttgctgcattattacccacagctcccttatgtattccgaccaatgcgaattctactcctaaatcacaaaaaacacctgctcctgaaaacccttgcatttcagaatttctatctgatgaattgatgtcacctgagcaaattttatattttaatgtcgatattctattatcaatgccagcatattctaaattcattgtatctatagatattaagtaagattgcttactatatccttctattggaaatcctgccataattagctttttatcttgacaaatattttctgattcaccttgaaaagttacaaatttataactttggaaatcgtcatatacataattcaatctaataattcctacatcaccaaaatctcctttttgctgatatgtttcagatatagcaatcatatttttttcaactaggacatttacttcttttccttgatactgaaattcaacttccacattttcacgatctttaataacatgtgctgccgtaaatacatatagtctattatgttcacagtccgttggtttccataacactccactacctaacatttgatcccctgcttttatgcggacagcatatttttttaaatcttcactatgatttcccattacaaaattattttttcttctcctatgtaactcattataattttattagtatcaatatatttttgctggtcattaattgtgaaatattcatctgaccaccaatcataattaagcagtaattcagtgtgatcctgctcctccccaaaacgccggagggtaactttatcaatttttttattagttgaaacaataaaccgctctgtgtctagccctcttattaattctcttgatatatttcttggacttccgtgatgaggtaatttcactatttcaaactttgtatcagaataatacttattaatagctcgtaatatattttcggatgtgctatctcctgaaaatagtatttttttatcatcaaattctagaacaaatataattgatgctctattactttcagatgtgtcagacttgtattcatctatagcatcatcaatattaccaaagaataaatttgacgcatgttcctgaaaagcatctattttttctatcttttctgctacggccaaaacctcttgttcagttggtccaatcactttaactgttccatcgcaaaagcaatactccttcccttccaaaataggatattctactggaattcctttttccttcatcaaggaaactaaagatgaaacattattgggtgaatgttcttgcatattgaaatatacacttgtcccaaatccatttatccaaaccttgtcaataattttttcgttttcatttttcaaatattgaatgcaaccttttatatggtcatcatctatatgagaaaaaatcagtaaatctattctttctttattttcgatgattttatttgttaaattgatgaagcctgatgcaaatgttgaaggacctgcatctaccacgatatttacatttttcttcgcaatacatcgtatccaaatacaatctccctgaaaagctttttgtacttctatttctatcattcttgttttctcctttatcagatatactttaacatattttctctatttttactattgtaaaagacatttagtatcagtgtaaacgtcaaatcatacgcctggcgttataattaacgcctctttattgagcggcgtggttttctacactcttctggccgtttctctgaccaagttatcaaattttcctactttgtagaatctatatttccttgttcatcacaaaaattaggtaattccgtaagaatatatttaaagtagtaatacgagcgaagattatccaacttagtttcatctgttctagatataagtcacagccttatccattctggtacctttgaaagtttttttcttatcaagccacgacaaaaagccttctactatcggctttgctttttcaaaacgagcctttttgatagtatcaaaggatatgtactttgctttaataccatcttccagatggaagagttggttgatatacatcatgccctgtgcggaaggttgcgtataagccagctctttcctttgagaatagcatctgtcaggtatctcctgatatggaccttgccctaagtccttcataatatcgtagtataatcaagcctttatctaatgactctaccctctattttctatttatctatctttcgattaacttagagcccaaaaatccacatccgttttctgtcagagcagccaaaacttttcttctcccaactaatcaaacgcaaatactccatttaacattacttcattttttataaaaaatgtttgtattcaaactttaccaagaaaattgcacaaaaaggcaataattatctacataatcactgccttctactaaatttattattttctattgctcattcgtctgtctcttcctcattatttctaaagaatttatctctataatcccgatacaaaagttttgtcaattcagaccttttatctgctcatcttatatctgcttcataaccgaacgcccattttcttttcacgcagaaaagaagcttcacactaattatttagtgcaaaatccccttcccgatttaccggaatctcttcctacatatttataactttcttttcaaactctgcctctgaatcaacaaaatgatatggctcatactctccaaaagcagatggtctgcttattgtaacaagctgtattttttcatatccaacttttttttcaattcttcttttaaagtccgaaaggtgttgtccatgtattgtctttaatgcaatacaaccgacttcatctatatgtttcgctatcaaatagcacatggtctaattcctccttaaactctttctctgataaaattttagcactctcatatcgttttctcaagtaacagcctacagaattatcatattctttcttatacacatatttatgaagccaattattaaactgtctgtcataatatgtattatactgaatttcaataggatagtgttttccatcaagctgaaaatacacatgaatccccctatagccatcatcattcgcttttccatttgtcatatctgcaatcctaaatttgtcaatttttttcagttgcaagacttcttcataattatcacatagagaacgaaatcctaacagatcatcaaatacttttcttgcttgatgatccggataatatcgtttatattttagtattgcggattgaacactctttattctataatctaatgccaaatcgtccaatccttctgctgaatcataccactcattcacttctataagttctttaatcagtttctctttattaaaatagtgcaagttcttttttaaattaattcccaattttgattgataggacaattttttcaatatatcagttgtcaaactatctctttctaatatatccgacataccattgtctctctttctaattatttatatacatcaaactttctctcattataacaaagtaatttttttgcaacaatactataactgtcttttagaaaagtcactctactttttcttcaaaactcatcctgcgaacacaaaagcaatcacctatatgtacaaattaggtcactcgtccatcttttttacctatttcatcgagtgttattctgtctgcacagtccgcagaaacagcataaaaacacaaaaaacagcactcaatatcactcgttttctgccttataaatagtaactcacgaaatattccactctcgtaactgatccaaaacatttcttagcatcaattcttctttccacagcattttttatatttctttcctgaaccgcatggacatggatcatttggatatattttcttttctactcgtatcggttcctcgttcagtcctctcggaaacattgttgtttgaataacatctgtatttccatttaagtcaaccggcacccccatagcctgcaactgtggtacggcatcctttaaaattgctgctgctttagaacttgtcgaaacaattgttggcattttatcgacaggcatttttcttgccatttcacttggtttgtaccctctgttctctttcattcgggtattgttatgtgccaccacaagtaactctagcaattcatttatcatcttctcttcaaattcaatattggcttccgtcattttattgataatctttgatggcgattcgccttcataactatttgcccatacttgcagacaccaggtcactgcttgttcataaggaagccttaatttcttaatgaaaaaagattccagttttttatattcagacgaacttgcctcatatccaattctacatatctcatctatctgctgtgccgaggggatataaaaatctttatccatctgttgtcgaagcaagtaaccaaattcctcattctcaaatagctgcaaatgcacaaatattcctttttctgagtataacggatcctcttttggccatcctttcatcccaagtctgtccattgtaaaaagacatgattccacaatatcaactggcatttcccaaagcatttctatcatttcatctatagagcacttcactttctgcctatacatttcatagataacttcgatcggtgctattccataatattgtataaaaaaatgtatgcactttaccatccagccttttctgcattgcttccgtcgaaatgactcatcatctactttggaaaaggcaacagcaacatcttcaaatacacaaaatctgtcagtaggctcttcaaaatatccaatccagtatctgtaaagctgcatcgcatctaccacttcatttacagaaacagctgtaggagaaatacaagctttccgaaataagtccatctgttcttttgtaaggcatgctaatctgcttctaagcatttcctctgtacaaaaattatcaacaattctatctattaaatcagcttttcggagtcctgaacactttctgatttcaaaacttcttgcctgatctaatagttcttcttttgtatattctgtcaaatattctcttaataacatttctgctccctatctactcatatttcatcttccataacgaaatccatattctatttttaatctctcatatatttcaaatgctatcggacagacttctactgtttccaatacactgtacaaactatgtaacctctctggctgatccgtatatggatatttcctgcaattctcaggtttatattctcccagcttacagtttccgtcttcttccagaaaatcacacggatgatgcttggttacatatgtattttcactttctttttttatcaaataagaatttataagttcttctttagtaagtcctaaatattctgcatctttctccaactcttcttctggaatacttccgcagtacatcttacaacagttcctacatctgctgcagtcatattttgcaaacaactcttcgtgaagttttttgaactgctcatccaattctttttcatctgcattacattttaaaaatgtacggaattcaatattttcattttcctttttcttcgcttcaaattttacttttcttggtgcaatcatattatcacctcatttttctcatcttttgctgacattgagccttttctcacccaactctgtcccgtcaaatttatcctttacatattgacaggttgcaaaataataatcctgacttcctttccatcaaaactcctgttaaaatttgattcaaaagcatgcctgtcttttataattttttctttgtcgtagatataaaagaatatataatccgccttataatgtacaatatcagcttctatttcttctgtcagtttttttaagtttgttgatgttcttgtacactttgcttctatgattgtatttaaagaaagaatttttatatcgcttctaacagttccaactcccgaatcatcacttacctctcttctagcatccggatacaacggctttataactgcataaagcaaatgctgtaaatcatattcattttcaatctgtatttttttcaagttttcagacgtaagtgatgccctcttatctggttttacttccctaaacgcttctaagaagaaataaaaatttcgcagatacctttcaatctccttttgaataaattgtgatgactcctcatattcttcacataaaatactgtccaaatagatcaacagattttcttttgcctttaacatattttcacgggtagattcttttgaaaatttgttcaccatatatttctgtttatttctaatattttgaacaatatcattcttatatgattcttgtttcatcatctggtgcagcttcaatataaatgcctcatattcctctacagtatccaccaatttcaacttttcgatatattctttcagcatattatccattcattctcccccatctcagataaaacaaaaacaacggatccaaaacatacacttttccgtctttccattctattgctttataaatttcttctttttcttttaggattgtttgtaaattatttaaatgactttttacagaatttctatccggttttccttctgttttaggaataaggtttatgattctgtcataaactgtgtcaaaatctaattccataatcggaggatttttggctaacgattccacaatcagtccatacaaatccaattcttttccatctaatgttttgtataaatttcttttctttccacgcggatttggacctttagacattacatttaccacatcgtaatagttaaagttaaccgttgtaaatttatatgccatttccaacatatcaaaatttacaatatgctcatttttgtcttccaacaatgtgcaaatgctcagacaaatatactgcattaactgtggtgatgtaaggcattcaactgccaactgttctgcaacttcatctgttatcttaatgtcaagttgtttaaatccttttaaagcaatctcttttaaatcctttttttcccacgcttcaatattaattaaactcaatcttcccgataaatctgcattctggcgaattgcatcgtctgccctatgcggaagagaaactacgactacctttaattctcttctaattgcatctttgagctgttgtgccatttttgtctgcatctcttttgaagcataatgaaaatcatcaattactaatactttatcgtgctctttataatattgaataacggtatctttcgctagaacatacttttcgcttttactatctgtttccttactatttccttcattaacctctctttctgtcgtcaattctcctttataaggcaaccccacttttgcagcaacaattgcccaaaaatctgtgttgctgttaaaatccgcaccagaaatttcaacaatgttgtcaaatccaattaccttctcgcataagattgtctttcccatttttgatggtccaattaatgatgtaaggcaacctgctgttctcaatgcctgctttaaacgtaattcatatgatatacctgtattttcataattcctggagacatatgtatattccggatacgctccaggtttaaatacattttctgcttttagtctcatattagcacctccaaatattaattactctaattataacacattttattactttttaaatattttattactttttattggtctaaatatcatttgaccataatataacttcattgttatactccagcacaaatgattttgttctctagcatacttaatagaaaacaaaaaggctgaagcccatgatgcgactccaaccctttaatttctctcgacaaaagaaaacatataacccttgcatttatatttaattattctgaatgatattcactccaaattaccatttttgcgtaacaaattcaatttcgtaacaatatcattctttcattttcagtttcgtttagtttcatccaatccatacatctcgtacttcaaatcacagaacaacactatatattgttctttagcactgctacattatagcacttcagaaacatccggaaaacacatagcgaacctaatatccactttttccgggtctttcatgacactattgacttcattcccgatataccgggcgggtttctcgatttttagtaatatttcatcatttaatgcaagttttctcatatatttcctttctgtttttgtatatatttcacaaattctttcgaacctgtttttgacttttcaaggtgaaaaatcgatattttttatgttgtttttcgtatgtaaattttactgattttatgtgtttttcgctcaaaaatccggtttggtcatttttctcatatttcccttactatttatcactggaaaacaccatgcataattatacaacacgatacaacattacagaagcatctgctatgtgattgactcatccaatctacaccattatatacattttagggaagaacttcaagcaaatatctttcgtcaagcggaatcaattgtgcggcgttattcttaggcaaaacttctagagcaaaggcgattatttcgcagtcggcattgtatacaactctttccgtattaacatatatttcttgggtaaaatcggctgaataataccctaagcttgcagcaatagccttcatgcttatttcaaattccgccagaattgttgcgtatgtattgcgtagttttctccaaggtatttttgtaaaaccacatttttccattaaccttgtatatgccttctgagcaaaaccccgatggtatggtttgccatcgtcctgacaacacagatatccatagtcatgaaaatctgggatatttgcacgtaattcttcatatttttgtctttgaagtataatttcatcaataacaaagtcagccagcggggttcctcggacactgtttctggtttttgtccgtagttcctgggtaagaagtttaccatcttccaatccttcgttttttgtgcttcttcctaactgacgttcaatataaatttcatgattaccgaaatcaatatcttcgtattttattgcaataatttctgatatgcgtaagccggctgtcagtgctaataataatgctataaaaattttaggttcttcttgtttgcataggtataacattatcgtaacctgctgaagtgcatatactgccggtaaaactggaggttgatcaacatgttctgccttcttattattctctatttcacattttttctctgtttttcgttttacttttattgcagattttacaggattcaaatagataatatgattttccaatgcgtattgaaatgatccaccaataacgccatatgcacttctcaatatggagtcgtaggggatgctatcgagcgctgcaatcaaatcatctctttgtatagctgtgatttttttatccccccagactaccagaaaataattatatatgatattccgatatgccgtataggtgttataagcaatatcagcttcatcaatcatataatagtaaagccaataatcaaaaaattctctggctgtatattcaaatggcacaaatgttttttcgtgaagttgtttgattgtattttctattgcttttatcgcttctgttttagaaacaaatccccctctttgcattggacaaacttttcccgattcaaaaacaatttcaaaacgaaaacagtattttttccgagctttgacataagttacactatcactgaatttccatgaaataattttaccgtagaagaaagtttcactgaccggaggttttatgataggttttacatgcatactatccctcctttgctgcgaactttgactgcaccaattgccggatccattacagaatcaatagtttttgctatttctttcttcgcttccatgattccacaatagatttcaaatgttgtagctacacttttatgtcccattaattttgatatcttttccaatgaaacaccctgctcaatcagtatcgtagcaaacatatgacgaagcccatgcattgtaatgtgtggaagtccattgcgtttgcaaattctttttattgcttcagtgtaagttccatctgactttatatttccttttactccaagacagatatattcagcccattcatgattttctgtaagtttgagaatttcttcattttcctttttccttatttccaattcatcaaaaataaaagctgaaattatcaatgttcgatagctgctataagattttggcggttttgtggataatctttgggtagcgattttgaatgtacgatcctcttcaataactacatcgtaatcacgtgttatttgccgatttatggatactgtgtgttgcaaaaaatcaaaatctttgtattttaatcccattatttccccttttctaagaccgcaaaatagtgctaacaacacctctaaatagatagaatggtattcctttgctgcagcaagaaagatcttaacttgttccttggttagaatcgtaattttaggggaattccaatatcgttttttaactcctggtagtggatcattttttaaatatccgtcatttaatgcatcagttaatgccaaatgaatgactttataagccatggcagcagagcatttgaatatccatcacattcatcaatcaggtcatctaaaaacttcgtggtaaccatgcctaataaaacatctcgttttactttaggtaaaatgatttgatagatggtccatgaatagccaactttggcagaactatcactatatggcaaatataagtttttcatccaaaaatccagatattccgtaaaagtatattgaatattggttagtctttttattcgctctatatctttttgaaacttctcattgaagaaaaaataactttgttcagcctgctctttgtcggaaaaaccgctttttattccatattctattgtataagtataaagattgatttcttttataatatgattccatgtattattttcataaaacacaacctcttttcctataatatcgttgttcatatataagcctcctcatgtgatgacttaaatacctcaatgaaaccttatcaaaatgataaaatttacgtcaacagaaacgtatgtccggctaaagatcattctgtctctccgttcaaccaattatcaaaaggtactttaggaactctatatagatttcctattttcaagactttaaaaggatgctgcattttataggtttctctaatcagttcatatgcggcacttctgctgattcccaaaatattttgtatttcttctacctcatagactttttttactgttttattttccacttgtcctcctttccaagtttctcgttttatggcatatagcttgtaataacggtatttgaagaaacaagacaatataaaaaatgctgcaaacccgaaggttgcagcataatatgtatctggattgttataatgctctagtagatatttctgttgtctgtctttcatacatatcacctgtccttgggaaacaaacaatggtgatttattgcatctattttttctctatagtaaatatagctgttctaaatattttgtatcatgtacttttttattaaatatagtgtaaaacataaatgtcacagaaatgtctcagaaatgtcctaaatcacaaaaattattatattatggtactttcttttcaatcgtacctttataatatttattcaaccatttcactcgactccataatgttcatctttgaaattatatgcactggaattgctcttgcgaactaacaggtgcttactgccaaaagtgttgcttcaagaataggcaggacaacgattgcgacaaacagaatcatatttttttattaggacagtttttgttttctgttttcggtttcatagaccagaataggacattcatgagaattacaatcagtaatacggcagctaaagccacccagaatcccatgttcagaccaagccattccgtagttccaaaaagtgtcatccaaagttctttccagttcattgttacacctccttaaagcaattcgccaaagtgacggacataagcctttttcaagcttgttgccaaaatcatatacaataagatacatggaagcagatatgcaaagtatgctgctggcagtgccacaaacccaagaagctttccaaatatcgtaaatggtatgacagtcagaatcgtaatccctgtcatcgtgaggaatgtcacaggagcagatgcccggctctggataaatgggagcttcggtgtacggatcatatggatcactaatgtctggctccacatagattctacaaaccagccagcttggaacattccgatatactgtgtctgcatagccgtcagttctgctccgctaaaatgagccggcaggtcattgaacaggatacccttggatacaaagaatgggcagaatacaaagtacatgaaaatgtatgtggtaaaatcaaagatggagctagttggtccgatccagatcataaaactgcctacactggaggcatcccattttcgtggtttggcaataaactcttcatctacattgtcccatgggattgccgtacaggacaggtcgtagatcaggttcaggaaaatcaaatgtacactttccattggcaagaatggcagaagagccgatgcagccagtacggaaaacatatttccaaaattggaggaagcagtcattttgatgtacttgatcatgttggcataggttttccgcccttcaatgatgccctgttccaagaccatcagatttttttctaaaagaatgatgtctgcagattcttttgccacgtctaccgctgtatctacggagatgccgatgtccgcagatttcatggcggcagcatcattgattccatcgcccataaagccaacagtatgaccattctcacgaagaacagaaacaatacgggctttctgttccggtgtcagtttcgcaaatacatcggtggtttctgccgctctggcaagttcggcatcattcatatgttccagatcagaacccaggagcatattgcggaccttcagccctacctgtttacagatggtccgggttactttttcattatcgcctgtgaggattttggtaaggaccccatggtttttcaatgcctggatagcatcggcagtagattctttcggtggatctaaaaatgccagataaccaatcagcaccatatcgcattcatctttgacaccaaaagctcccactggagatgggttgctcttttgggcgatagccaaaacacgaaaacctttttcatttaatccatctacagttttcaaaatccggctgcgcacttcttcacgcagaggttgtacatgcccgtcacattctgcaaagctacagatcgaaagcatttcttccacagcaccttttgttaccatctgtgtctttccgtttttatcctgtaccacagtggataaacggcggcgtttaaagtcaaagggaatctcatccaccttgacgtaggtttcggacaggtcaatcagacgtttatcagccgcctccatctcctctgttttatggataatagccagatccatgagatttttatatcctgtctgaaagtaactgttcagataggcatggcgaaggactctggtatcatcttctccatttacatttagatgatattccaataccaccttatcctgtgtcagtgtccctgtcttgtctgtgcagaggatatccatagcaccaaagttctgaatggaattgaggttttttacaatcgtttgttttttactcatggaaacagcaccttttgcaaggcaggtggttacaatcatcggaagcatttccggtgtgagtcctactgcaatggaaatcccaaataggaaagcctccagccaatccccctttgtaatgccattcacaaagaataccagcggaaccatcaccagcataaaacgaatcagcacccatgacacagcattgacacctttcgtaaaactggtttccacagcttctccggcaacagcggcggccatagagccaaacagcgtatgatcgccaacacagataacaacagccgttgcacttccggagattacattactgcccataaatgcaatattggtataatccgtcacactgtccttatgtgggcttacatgagggagcttttcaatcggttcactttctccggtaaggcttgcctggctgacaaatagatcttttgcatccaggatacggacatccgccggaatcatgtccccagcagataaatggacaatatcacctactaccaagtcatccatgggtatctctgttttttcctgccctatgcgggtgacggtacaggtcgttgtgatcattgcaagcagcttttccgccgcatttccgctgcgggattcctgcacaaagcgaagggtaccggaaataaataccatagttaaaatgataacgactgtcaaaaaatcaaagtcctctggtacgcttccaaagagtgaaaaatacgggaaaatcatatccgtaatcgtggaaacaaaagcaaggcaaaataaaatagcagtaaaagggttgataaatgcacccgccacacgttttgccagggatttctttttttcgtgggtgactttgttcgtaccgtatttggaacggtttacggatacggtatctgcttctaaccccctaagtgtggtatgaaggatctttaaaacctcttttaccgggttggttgctgcagattggatgcgacggttctgttcgtcacggatgactgccttttctacagtctggcgaacagccatacgattttcttttttgttcattggtcttacctccttgaatttttgtaggggcaaggaagatgatatgagggacacggaatctgtggacactcatacaatattctctgccttcgtggactgccttcagagtccatgtctttcacctcacaatctttaaaagctatctatgtaaaaccgcaatggaaattacggtctgtggtatcggttgctcttttcgatataccagatatctaagccggcaagtatcatccatgcaatcatcgcagatacaaaccagtggcttgaaaataagggcaaaaatccttttaccagaaagatgataccgtttaaggtaataattcctccgatattgcggcaaagagggataattcggagtttatccttctctttttgcggcatatttttccatagggaaagatgaaggtagccttttccaaaggcaaaccaaagaccggcaagggtaaataggattccaaaaaaaatgcaggtaaagtccattgtctgatcctccttttagtgatagaagcggctgcttcgtttcgtcagtttcaaaagtttggtgataagtacaatcatggtggtagcaagaataacccagaccacagcacttacctgataccaaaactgaaagataatcattctatatccagagaaatgccagcccagatagctgcataggattgtaaatatggggtagggagcaaaaaggattgcccctttcaaatcttttcgttttctcttcaattgcaacacctcccaattggcatgaatcattaccgtatttgtggatacgtttctttgaccatgaaaagtatataaaaaacagcaggagaatcctatggctaaagtcttgcgattttcttgcgatttggcaagaaaatagacgggctggaacctaaaatggtctcagtccgcctttctcataactcatcattaaatttgtaaccaatcccccagatcgttaaaatgtatgtgggagaatctggggcaggttcaatctttttccgcagtttccggataaaagccatgatgttactgttatccagaagataatcctcctcccatactgcacggtaaatctgttcttttgtaaaaacttctccacgattcttagcaagaaaatataaaatgtcgaattcctttggtgtcaggctgatttcagaaccttttatcaggactttccggcttcttggacgaatctccagatcaccgatcagaagtgcatccgattgtataccaatagccacctccgtatcttcggagtcccctaataacagcgaggatacttcaccgcttatcatgtcctgaataccagaaagcagatcttttgtataagcactttccggcggttcccttaataatttttccaagagccagatttcaagggtatgatccatgggaatataactgatattctttttcatcatgaacgcctcctttaaatcaactcttgatatttgttcttataaaaatatttggttacggaactcagcagcatatagaaaaatgccacaagcagcaaaaaggcaaaataccaaagcggtaattttgtcagtccaaacagtgatgccccgctggtaaacgtaagggctgtaaaagcaagaatccccaccaaagtgatagagatgaccggtgcagatgccctgctttggagaaacgggattttggcagtacgaaggaaatgcaggatcaaaacctgtgtccacatggactccaaaaaccagcctgtctggaataaagcagcgtactgaagttttagggaaggatcggtaagctgcaggtaagttgcccctccgcacagtgcaggacataggaaataatacaaaaacaggaaagtcacaatatcaaatagggaactgatcggtccaaaagaaagcataaactgcttcagtgtcttgccggaccagtctcttggggacagtatttcttcctcatctacattgtcccagggaagtacgatacacagcgtatcatataacagattcagaagcaggatctggatggaggtcataggaagaaacggtaaaaatgcactggcacaaatgatggaaaaaatatttccaaagttggaacttgcagtgattttaatatactttagcatattggtaaaagtctttcgcccttccaggacaccctgctccaatacatttaagtctttttgcagcagtacaacatcagcagcatcttttgcggcgtccactgctgtatctacagaaatccctacatttgcctcatttagtgcagggatgtcgttgactccatctccaagaaagccaacggtatgaccattctctttgagtgcagaaaccagacgcactttctgaccgggagtaagctctgcaaaaacatgggtttcttctaccacctttttcagttcacagtctgtcatttcatccagttgggtgccggtcaggatatgttccgcagagattccaacccggcggcagacggataccgcaatggctgcctggtctccggtcaggatcttcgggattacttttaatctcttcagtgctgttacggattcgcttgccgtctgttttggggcatcaaagaaagacagataaccaaccaaagtcatatccctttcatcctcaggtgtgatttcccttagtgttcccacatgtttccgagccacagcaataactttcatcccatcctgcaacatttctcctaccacagaaaatacgctttgtctggcatctttctccataggaagtcgtgttccccgatattctacatgactgcatcgggaaaggatgtgtgcaatatcccctttcataatcagatggctgtttccggtattgtcctgcacaagggtactgacaaacttacgggtatagtcaaaggggatttcatctgccttctgatattctgtcagaagcttggcataatggatttccctgcctggcatggatttacaggcaagaatggcattgtcaatgggattgcagacgccggagtgataggagctgttcagataagccagatccagaacctctgtattttcattgcccagaatatccatataatattccagcaggatactttcattggtcagtgttcctgttttatccatacaaagcacatccatgcttccaaagctctgcatggcgttcagatctttgatgatggtctgttttttacccatagcaaggcttccttttgcaaggcaggcagtgatgaccatggggagcatttccggcatcagccctaccgctacagacagtgcgaatgcaaaggattccagccactttccacctgtgatccccaatataagaaatacaatgggaaccagaactgccataaaccggatcatgacccaggcaatggaattggctcctttttgaaaagcatttttatcttcggaatccggtttggtaaatcctccgtacagcgtatccgttcctacagccagcacaatgccttctccttttccgctgataactgtggttgccataaacacaagattttccaattgtgttatgggttcctgctctttgtaacaaagtgtacggcagctcttttccaaaatggcgctttctccagtgatagcagcctgggaaatgaatagatcggttacctttgtcagccggatgtccgctggaacacaatcaccagcagaaaacagaaccagatcgcctaccactaattcttcaccggggatttctcgtagttccccattccgtcttacagtaaccttttcgtgaatcaaacggtcaagctgtgcggctgtgcttttcgcccgcagctcctgaattaaacggatgataccgctgattacgatcatggaaaaaatgataagggcagtagtagcgttccgtgtaaaattagaggccataaaaacatcggtgacgagagaaacaatacctaaaataaatagaatcacatgaaatggattaataaacgctcgccgcaatcgctggatggtggtatccgttttacgttcctgaaaactgtttttaccatatctttcccgcattgcatcgacttgttccccagatagtccaagggcagatgtaccaagatcctggcagatttctggcggcttacagtaagcgtactttttgatacggctgtcaaatagtgttgctttcgacaaaaataggttcctcctttctcagtatgagtaagaatattttaacatagagttgtgaaaataacagatttatattcttgcttttttcttgcgattcatttgaaagctaccgtcatatatctgattgacgccacgagtcggacttttcgattgcaatataacgggatcaatatttttattttgaattttcgataatgcgattgacactgctttatcatattctaaactaacatcatttccgtttttatcaactactctcccattcacaatttctgcgcaagatctgggaattttcatacctgctaatacttccgggcagatagaaataacttctttatctttcaagaaattgatagctgttatattttcattgtttttcccattacatttaccgttcactcccatgatacaggcactaaccaatactttcacatttatccccactttaaattaaatttttcatattggattcataagctatcagttattccacaatgaacaacctcttctccattcagcattgcctgttgaatggttctatccaatgctgttggcacagtcacatcaaaaagcactcgattacaacagggatttggaaacagcaacaatcctccatccctaccatcccctttatggccataccttggatactagaatggttatccatgctcttaaaaaggcattttaaatagcaaaaccgcagattttgaattcagatcaaggttgtcaatttacaagccaacagtacattgatttcgttagagaaaatagtatccgtcagagtatggacgggaaaagtcgctgggctgacaacatcatgattgagcgttggtttcgcagctttaagtatgaggaagcttatctgacgcagtataacaacatcaaggaggctagagcggacatcggacgctatatccacacttacaactttgaacgatgtcattctgcccttgataataaaacactggctgaatgctactatccggcaatgattctgccttatgtagattaatgcatatatggggcaggcaaatgtgataccattctccctggttccttagtaactataaaccatatcagttcattataagaatcttagatttttgtcttgacaactaaaccactatagagtatattcgtatgttaaaggaattaaatatgaatttgaaacaaaacaaaagaagtgtgctatactattgttcagcaaaaatcttattgacatatttcgaattatttaggaggataaacgtttatgtgtacagcagcaacttataaaacaaaagatttttattttggaagaacactcgattatgaattctcttatggtgatcagatagtaattacaccacgtaattattcgtttcactttcgtcatgttggtgatatggaacatcattatgcaattattggaatggcccatgtagcagaggattatcctttgtactatgatgcgatgaatgaaaaaggagtagcaatggcaggattgaattttgtcggaaatgctgcttattctgaggttcagtctaatgtggaaaatattgcacagtttgaatttatttcgtggattttaagtcagtgtgcttctttagtagaagttcgtgagcttcttgatcgaattaatattgttaatactcctttcagtgaacaactgccattagcacaattgcattggattatctctgatgaaaatgaatcaattactgtagaatctatgtcagatggtctgcatatttatgataatccggtaggagtgcttacgaataatccgccatttccacaacagatgtttcaattaaacaattatatgtatttatccccaaagcaaccagaaaacactttttgcgaaaatttggctcttgatgcatatagtagaggtatgggtggattaggtcttccgggagatctttcatcttcctctcgttttgtgcgtgtagcttttacaaaagtaaatgcaatttcaggtgaatcagaggcagaaagtgttagtcagttcttccatattcttggatctgtggatcagcaacgtggatgttgtgaggtggctgatggaaaatgtgaaatcactttgtatacgtcttgttgtaatgtggcaaaaggtatctattattataatacttatgaaaatcatcagatcagtgcagtagatatgcatgtggaaaatctggataataacaaattgatttgttatccggtaattcaaggagaacgaatcaattatcaaaataaatagtatttagaataaagggatgaagtagaaaggaaattaccatgacttataatggtctcataaattaagacactttttcggaaattttttaatgaatctgatatactaaaatcagtatgaaagagaggattcataattatgtccagacaaagaagaaactttagtgccaaatttaaatctgacctagtaatcgagctgcttaagggtgaaaaagatctcaacactcttgcaactgataataatatccagccaaatcagcttcgcaattggaagaaagaagtcctaaacaatgcttctgctgtgttcgataacaagcgtgaggaaaatctcagagataagcttgctgaagaacataaggagaaagcagagtacacaaaaaaggttggtcagttagcaatgcaagttgactggctcaaaaaaatctgaaaaaattggtggatcagactacgagagtaagtttagtccaaaaccttttgacaactaaagaaatcccagcttctgttggagcacaactgctcgatattaaccgtacaagcatttatataaaagtttacctatatcggatgaagaattggaatgcaaagcgattattgatcatcttcatacagacaatcctacttggggtgcaaggcaaatgtcagtacaacttaaaaatagaggttatcaagtaggatgccgtaaagcaggtcgatatatgaatgaaatggatatttatcccatctatcctaaaagcgcctagaaaataagcataagcaacaaggctggaaagcagatttttcctattataaataatactctacacctttccggctgcggatgaaatcctgcacctctctcaactcctctgctatccggcagggcggaagcgcacacatcacatctttgtgatacttgccgccttttcctgcccggatatctaaaatagacaccacgcaggtatcggtttctgtccggatggctctcccaaatccctggcgtagtttcttctgcatatccggcacaatgatggactgaatataggtttccagggaatcataggtttccttctctgcctcgctgatgggatctggtactgcaaaaggcagtttcacaataatcagtgaagataccatgtctcccggaaagtctaccccttcccagcaggagccggctgcaaacagcaccccattctccatggtcttgaaccgcagaatttcttcctgggaatgcctccatacttccaccatgggaaatggcagactgtctcttaaaatctggtacacactccccatcaatgtataagaggtaaacagtaccaacgtatgtccgtaagtggaacagatcagggaatggatctggtttgccaccattactgcctcttccctgctccctctcctgcaatgttccagcgtctttggcaagtataacagacagttcctctcataagaaaatggggactctgccacatattcctgcactcctgctcttccttccagcccggtgatctgccgtgtgcgcaaaaagcctgcgcctgcctttagcgttccgctggttaagatggcggatatcccttcttcccgatcccataacatcttctgaagcaattctgggatttcccggctggctgcgcataaaatgggaagctgctctgtatcgaattgcagatagcagacatatttttcatcgctgctacaaaaacacttcagcacctcttttgcatcctccagtcgattccgtatccactttggaacacatttttccagcttgtccaaaagaaattccaacatttctactccttcccacagagaaaccacactatctgttgtatgacggaatgtttcccggattccttttccaattcggtgttctgcaccaacaacatgcaatgcgtcacacatcactgtccgcaggattcttgcctcttctttctgatgctcccgttccagataatatgctatttctcggatatcatccatgcacaggttttttccaaacatctgccttgtcgcttccggtaacttatgagcttcatctacaatcaacgtccgataatcagacaataaaggcttgtatccttctgctctgtgatacgcatctgccagtaaataattatgattacagatttgaatgaacacatcctgtttcctggattcttccagatatctctgatagcggcacatctgcctgcccggacattctcttggacagaatttcggcacacagaccagccttctgtcaaacccgctcagattctttacgctatccatatcatactgtttccgcaaggacagtagtgcttctttttgggcagcattcttctgtttatggcggattgcttcgattcgttgttccagcctattgtcacagacaaagtgttctttcccttttcgcaccactgcccgaagcggagactgaatgattccttgctccagcagcaccctggacaaaaagggaatatattccgtcaatatagctttctgcaatgcgatactggaggtggacaccaccaccggacgatgttccaacggatttcctcgccctgtcagcatagaatacttccgcaataatacgcaggctaccagataagcataggtcttcccaatccccacccctgcatcacacaaggcaatctgttctcccagcagagtatccagcatttcatggcatagacggatctgctcttcccggactgccagtccctgttccggaaatagcacccggaagatcttctccacttcctgatgcgctcttttttgatattcaactttataaaacatagtacttctttccgcatggcgttaataccacaagaatacggctgtggcactttcccacagccgcatgtatctgatatcaacgacacactcttttttgatttcttatcgttttttcttttctttagcaccgtatttgtcctcgactccccggctgccataccacatctatggtagggaacatcacaggcggatgcttcgcttcgcaccgctcacagatttcctgaaagtcttgctgattacaacttagagtccatcctcttcttttttgagaagaatttcgtatcattatccccctccgatgatcctggcgaaagacctgcaaaagtccattcacagctataaggagtcgctcagaatgagaacaggcactgacagttttctcacgaactgattcgccatagtctttgtacagacctttccataacaatcctgcagtgcttgttcccatccgtcctggcgcttatgctgtcacgcttctatctttgggaacgtacctgtaatgctggtatgtggttgtcaaggaacgaggggcaattacccctttcatatatagagccgatgagataccccatttttcttcacttcttcaaaacttttttaatttttttcttcaatcgctcaatccgtgtataaatggtcttttccgctagtcccatctggcctgcaatctcacgaacagaaaatccccacatcttcagaagtaaaatctgcagtgttttcttatccgactccaaaagaacctgtaatagctgctcattctccacactgtcaagtaactgttgaatattaagcaccactgaagatggttcttccaattccctggtgtataattcttcttgactagaagaaaaatgttcccagaatctccgctccgcattaaaatcctgccagtctaattcacgaagtctttggatcacctcttcactgacaccggattttcgcaaaatccgttcctcctgctccttccactgtttccatttagattcttcttttgctttatgaaatgtcacctttcttttcctccgatctgaatttttttgaaatcaaatcggagcggcggtgatcttgcattctcacacgagaaaggtcgtgctaactgaaattttgtccacaaaaagaaagatgccgcaatcctgtttcgaattgcgacaccaccaaacgctgcatatgaagttagtttttcctcttttgtaactctttccggcacatatactgctcctttatgtcatgcaacgaagcccattctttacataaagaagtagtatacaagacgaatctgtcatcagactgtcagttttctgtcaaataactgtcagttttcctgtcatttcttttctattacagttacaaccaaatctcaccatataaaaagcaggctccattttcagaaacccgccttctatgattccttatatacttttaaacaatatccaacctcttttacactgctgattatatgctctgcatttacatctacttttttcaatttctgtttcagtcgatgtaccatgcagtaaataatatttgtaatatccccatgtgggtactcctgccataccagttgatagatctgactgtatgtatatactcttcccggcgtagttgctaacagatacagaaaatcaaactccctttttacaacagggattcttttatgctcccattctactgttctttgaagtggaaggattttcagttttcctaccataacagggatttcttcttttctttccgatttccattctgtatagcggcgaatcaatgcatacgactgcagactgacttcttccgctgtatacggttgtgtcaataccacatctgcccccaagtaaatgattttatttcgcatttcagaatgatccggtaataaaacaatcataggtgttatcaccagctttcggattgcttctacaagttggcatactatttccagttctcgttttactgcaattaaaatcaaatgataagagaaaactgtcaggttggaaagggcatcctggatacttttcatttgataaaactctgcttgttgttccaacaaaatcaaactttcccatgtcatttctccttcatcagcaattattataattctgtttttcttcacacccccatctctctgtttctcatattacaattcctccacatgactttctgtataatgataaaaatagttttcattttttaataacgccagaaaaaatatttgctgcacttcacatgaattattgcttcatccggtataaaatgagtttcatcaaagacctatcctcatttacttacaagtcccgcaattgatgttccataagccaataaacatttccatatcgaaaaagtctttgatatatatacgaatagttaaatctttccttgtctgcatttgaatttaacacctatatatgtattcttcatattctcccagaactatttttaaagcggtattgtaatatctacattttacatcataaaccgattttcccacggacacaaaaaatctttttcctgctccagaattgagtgacctatagtttttttgctttatcatcccatttttacagtgcctttatcacaatttcagaagaatgcacacccatttttcggatacagcataatttttcaacagaattatatttttgttctaaattctggataaaacaaaacttttgtcttttaagacaattataagtacttgttggaagcatcaaatactctattggtgcctaattcccgtttccgattaaaaacttcaaattattccaaaaagatttgtacaattcgtaacaccgtggatttttttaagtttttatatatccccttgtaaaactatttttttcatttttcccaagttataagctgcttagaatataatgggcattctaccaaacttaacgttttaacgtatgtactgcaaaaaaggtctatatattcttccaaggttataatcgaattttcgtagtataaactcattgaactcatttccacttactacacattcgttcctaaattttaattcttccacatgattttctgcataatgataaaaaatagtttccatctctttacaagacctaaagaaatatttattgccttttaaaaagaagtaattaaaatcctttttaaccattaatctgataaatttatacttgtatccgcaatagatgccatttctaaatcatgcgttatgataatacaagttttatctgcaaaaatcaaatgaatcgactctttcagtaacccactagttttagtagccaaatttgatgtgacttgatcaaaaaacattacatcaggattttttacaatcattctagtactacagcgaactttcaatagttatcttaaattgtccctgaatccgtgaagttcggagatttttaatgttgatccctgaagggaacagatcaacactgagaatttctattctgtggcatgcaacacttctttgtaaagatcatcgttgccttaagcagcatgtttatccacaggcattgcctaaaaagggcagacgccccccttaagcgctacctgtcatggcgaaatatagaagtaaaatagaaaaaatcatcacatactgaattgtgcaaatgcagtatatatttcggcgaacgtatgtcgccagacattacttttgcccagacccataatcaattgccgtgcatgctcggtaacatggcttgccatcataatcatgttgctgataaccgtacggagtctgcgacgatgtaccttatggcgtgtttttcttctgccaatggattcctgtccaatcatccgcaggatattgtaggcaagaatggtcaattcaagcaccagttcattggtgtcaaactttccggaaggcagccgttccacatccatatcggtcttgatttcactgtgaaactgctcacattcaccatgggcatggtaattctgaatgacttcttcatctatcatcccggtattcgtccaccaagtgttcacttccagatcagaaggaagaagaaattgaccatatttatcgatggtgcgttctatgatttcgtatcctgtacgtatggtaacggttttatcactgccatccactgtgtgataagtgacatctttccagtcacttccaatatagacggtttttccgtcacgtggggatgtgatattttgcgagttggtttttgccatctcgaaccacgcttccctgctttcacggcgtagatttcgttttataatgaaataacagccgctttccaacagaattccaatgttctctgcggcatcattcccggaatctaagcggataaggagcggctcatttgtgagttgtttacacagtttaattgtttcacgcagaaaaccgggtgtgtcgcactggcaatgttgccttccctcacgcagttgtgcattgattagatacccttccgttccgatataagccatgattggagcatatccatcataccctttataagtacgtgatacgccttcttttctggttttcgaattgtcaaatggtgtgacatcaatgtcaaccggaacgaaaccattgggaagtttggaaggaacgattccattggaacgcaaaagttccacgttttctgccagaatatgttctcgctgggaagagccaatatcatccattctctggcggagggtttcttctgatggaatgttgtaggcgattccaagagcacttttataaaaatcccggtcatcatccatttcatgaacagcctgaaattgtggtttccccatacacaacataccaatataggaaaggagaatgtcgccatttttaatctgatgctgcgaacggttgggagttacatccattcgattgcagcgttttacaaaattgcttttgccaaggatagcacctacaacagcaagaccgcttgcaggaataatacgttcattggtaaattcaatttttatatttttcatgatattctctcctttgtaatgtaaatttctaagaagattataccagaaagagacttcacccaacaggtgaaaataaaaaatacggaaacatcttgaaaaccattggaaattcagccctttcgatgattaaggggagttgaacttcacggattcaggttgtcccctataactgatataataaaagtgggtggatattatgatgacaaacacaacatatgatccacgattattagaacagtgggcgatcgatcctagcagtacacaggatatcggaaggctcttagagacatacctgcaccaatacgattgtgcctttttctctaaaaaacagagaagccatttcgcagcttttgttaagggattactcagtcctttagaccgtaaatctattgaacccatcgccttgcatttattagatgagaaatctgtccagcccatgcaacagttctttacatgtgctccgctggatgagccggcaatccttgacatctgccagcagcttctggcagcccaactgaaccatgagggtgccatgttgtctgttgatgataccagcttcataaaaaaaggaatacattctattggagtaaaacaacaatactgcggcaggctgggcaaacgggaaaactgtcaggttgggggattcctttcttatgccggtgactccggttacggcctggtggactatgacctttatatcccccaggcatggttccaggattcccaccagcccctgcgtgccaaatgccgttttccatagggcaggaccttccttacaaaaaatcagattacacaggatcttctcaaccgtgcctttcagacaggacggtttcgggcccgatgggtcggatgcgatgccgcatatggctgtgaccatgcattcctggatagcttacatctgccagatggagtatggtattttgcggcaaccaatacaaaggagcaggttttcctggaacctccacgtatcataagctcagaaccggacagaggccgtggccgactaaagaaataccctgtgtgatccggccatccggtcagtgtgcgaagcctggcagaagcagcggatcttccatgggaaccggtaactcttacggaaggctccaaagacccaatcaagcgcagaggtttatcattcgtgtcgtgtcttgccgcaaggatgggaaccggaattacgtaaaaccaggggaagctgtctggttatatgcccgcagatacgaggatgggaccatcaaatattttgtatccaatgcaccggatcatatctcgtatacctagctggatcgggcagcaacgctgcgttggccgattgaacaatgctttgaaaaatgcggaggatggctaaaaaaggaattccgctgacgatgcccatggtcgtcaggttattgtatagcatgatagagttcacatcttcctgcatgcagaggatcatctgctattatataaaaaggaatcattgtgcttatctgtcgcatcgtaaaaagaaacttagttgttcgctgtagtactagctatactcgaactgcttcctttattttcagaattttcgaaccgttaaacaaagactttataccctcttatagacaatcggaacgtcatatccaaatgttctttttccattcacttccatactttcgaatacttccaaacacgtatccgaaaacttttcccatagtttaaatatcataacgggtgagaactgactagtactgcctccctcccagacaccgtttctctcataatatagtgcaggagtaaattttttggatttttttaattcaatatattccacctctttcataaattcatatgaaaacgtgttcttatcttccccatttggaatttcataggatgaaagtaaaattctatcttctttctctgtaatcaagaaaagatgcggtgacgcatgacgctttccttcattttcataataactttcttctacaataaacatgcccttaaaatcagcaggaagatttttaattttatcattgcaaaccgtatttacgtgctgtgcataagggtatgtctttcctgcctttttcattgcatcaaattgctccttattatcaaatcgtcctgttatcagttttacaaattcttctattttcgtcatagcttacctccaaaatatatcacaatctcttggaatcttcggcccagcaaaatcgagacctgctaattcaatttctagttacacccacaattcaatggtggtttattatcagctctcctaaggttactgttactgctcgtcctaaaagacggatatcacaagcacataggatcctttttttattgcccccacacacctctgcttattccattctccccaacatagctaggggattaggcttttcattaacgaaagactatcgatattatatcctacaaaaataacaatattttgataatctaatccatttttcttaaaactgggggatacatccctacccacagatttctccaaaatttatacgtaaaaattgacaatccttaattataagataaattatttctggtcaagtacggactggatctgtttcatcagctgatcgtagtttgactgatcatcgattccgcccatgaatggctcgccaatgatatttccgtctttatctacgagaacggttgtagggaatgccatgatgtttccagcatattttccaactgttgaattagaatcgaaagtcaggttcttgtaggaagcgccctgagctttcagaatttcttttgcttctttgattcccgcttcattgttgtctaaagtatccgtgttgataccaacaacttcgccacccatttctttgagtttctcatttaattcattcagcttagagagctctccgacacatggcttgcatccactgaaccagaagtttacaactgtaactttgtttttagcgaaaagactgtcatctacatcgtttccatccagatcttttcctttgaaagctttgaatacagctgtggattcgtctgatttggaggaagaactgtcagaggaatcggatgcagcaatctctttctcaagcttggcaatttcttcttcaattccgcggattgtctcgatgtctttgcacagagtttcatattcttcttcagagaaagagtctttgttagattccactgtgcttgcgagggaatcagcatagttttcgctcatggcatcaccggcagcgttcttgttcataagaccaaaggctttgtcccatgcatctttgtgatcagcaaaaagctggttttcctgctggtaaaggtcgttcagtttttcgttcagctcgtctgcgctgccagtttctgttgtggaagaagattcctgttttgtgtttgtattgtttgttgaggaagagcttccgcagcctgtaaacgcaaaaagtacagaaatggcaagggatgcagcaattaccttttttaatttcattgagtttgttctaagtgttttgtttttcatgagtttaaatctccttttcaattttattttgttcgttttagtttatttattgtcagccttttttttgtttgaaaatccgtaatgatagcagattgcatcagtcggacaggctttcatacattctccgcatcggatacactccggatggtttggtgtgtctactacattgacatccatcttacagacacgactacatttctggcagccaacacatttctcatgatcaacctgaatcttaagaaaagataccttgttaaacagtgaataaatagcacccagcgggcagatccatttacaaaatggacggtaaaacaagatgctcaggatgatgaaaagcgcaaggattgtgaacttaaatgtaaataaatgtccgagtgcggcacggattcctgagttggcaagtgccagcggaattgcgccttcaagtacgccctgtgggcaaatgtatttgcagaagaaaggatctcccataccaagtgaattggttacaaatgccggaagtagtataacaaagacgaccagaatcacatatttcagataccgcagaggcttcagttttgcggtggaaaatttcttgcccggaatcttatgcagcagatcctggaaccatccaaacggacagaggaatccacagataaaccgtcctaacagaacacctaacaggatgaaaaatccggtgatgtagtaggtaaatttgaattttgaagaaccgaccacggcttgaaaagctccaatcggacaggcacctgtggcggcaggacaagagtaacagtttagtcccgggacgcacatcgtttttacatttccctgataaattttccctttaaacagattcgggatgtgaatgttggtcagtagtgtagcagctgcctgaatccatccgcggaagcggaccagagggtttttgtttgatttcattttcttatccaattccgacacactccatacataattttattgctttgctgagtactacagcggcttcgccgcggaaaattccgccaaagaaaagaaccagaccggctgtaagtaaaagaatctgtgatgctttttcagatttcataaaatactcctttcaatgttcaaagtcagtttattgacttttcgatgttggcattatacaataggaggtgtaaaatttctgttaagaagatggagaaaaataaagtgagattattagtcgttgaagatgagaagaaattatgtgacatgatcgcgaaaagtctgcaccagagcggctatgaggtggatgtatgcaatgacggagaagaagcattggatatgatttatgctgaaatgtatgatctgatcgtgcttgatcttaatcttcctggggtggatgggatggagattcttcgggaacttcgtaaagaagatgaagagacaaaggtattgatcttgtctgcgagaagtcagattgcagataaaattgaagggttggatgcaggtgcgaatgattatatggaaaaaccatttcatttgcaggaactcgaggcacgcgtgagaagtctgacgagacgaaaattcatacagaaaaatgtctgcctggaatgcaacggcattcggtttgatataagagaacgagtggcgtatgcagaagagaatccggttgcgttgacgagaaaagaaaatgggattctagagtatcttcttctgaatcagggccggccggtcagccaggaagagttgattgagcatgtttgggattcttctgtggatagttttagcggctctattcgtgtgcatatgtcttccctgaggagaaaactcaaggcgggacttggctatgatccgatcgtaaataggattggcgtgggttataagataggaggagatggcaaagcatgagaaaattatcactccagtggagactgacaatccttactacagtattgatcacagtattgtgcggatgccttacatttttcttatataagaatggagtctattatatcgatacacttcagaaaacagttacagatcagggaaaaacaccggaagcactatacattgagattccggataatgagtgggacaattttgcatcacaatttgctacggaggtgtataattcgaaatccgattatagaaacagaagtctactgatcacaggtgttgtagcgttacttggtggagcggtgacatattttattagtggccgtgcattaaaaccgctcagagagttttctgagacagttgaaaaagtacaggcacagaacctgacggattatacgatcgaagagaataagattgcagagctggacatacttcgtacgtcttataataagatgcttttgcgactgtcggaatcgttcgagacacagcgccagtttaccgggaatgcagcacatgagctgcggactcctttggcattaattcaagcacaactggacctctatcatgcgtcagaaaatccggagaatggggaagcggcgcaagagacgatccagatggtgacagagcagaacgagcgtctcagcaagttggtcagaacacttctggatatgagtgagttacagacagtagcgcgcaatgacaagatcgaactttgtggactaatcgaggaagtgctggcagatctggaaccgttggcacaggaaaaaggtgttacactgatacagaaatcgcagagtacagtagatgaaaaagaagagaatgcaggcgagggtctgatgctgacaggaagtgatatactgatctatcggatgctttataaccttgttgaaaatgcgattaaatacaaccatacagatggaaaagttacggtatcggcagaacgaaagaggaaagaagttgttctgacgattgcagatacaggaaatggaatcgatgagacattccgagagcggatctttgaaccattcttccgggtggataagtcaagaagccgaaaaattggcggtgtaggtcttggacttgcaatggtacgcgagatcgtgcgggtgcatgacggggagattgaggttcatggaaatgagcagggcggaacgacatttgaagtgaaaatgagtatagaaagactaactattaaaagtcaagtctaaaatgaaagttttttgaatgaattgcagaaatgcatttcagatatatttgaaccttgaaaactgtatgacaacaagagcatctttataggtgctctaaaaggagatatttacagaaaaaaattaagcagttggcagatatgcttttcctgatttctccattgcaaaaatcaatcgcacaagcttcttagcggcatgggatatggcaacattataatgcttgccttccgagcgtttcttttcaagatatgcaccaaaagatttatcccagtgacagacatattttgtggcattgtaaagggcataccggaggtatctggaacctcgtttctccatatgggaataacagttgtctaactgtccggattgataagtggagggagacattcctgcatatgcgaatatcttatctgcggaataaaacgagagaaatccccaatctcagcgatgatcattgcgcccatccggtaactgataccgggaatggtaaagattggcgattggatttcttcatccatgattcgtttgatggctgcttcaatctcgtcaatctcaatcgctaattcccgaataagttttatggtgtgctttagtttcaaagacttggcaggcatatgagaaccgatagaacttcttgcagcgtcacgaaacatgacagcagtatcttttccatatctgcctttcgaactatcaaagagtaggttggaaagccttgtgagatgtgcatttgcaacagcatctgcacttggaaattcacaaagcaaagcatagacggatgccaatagacggatgccatatgaagcgtaggaacaagtctttccagctccgggaaaagaatacagacaagtcttgaaacagaacttttcaattttgcccgttctttgaccttatcaaaacgataacgggttagtgactttaattcctcattgtggtaagatgtatctgagtagagccgattatcccataagtattcaatcaaatctgcccttgtacagatgactccgtcatgctcaaaaagataatacatgatccgcaattcattttttgtaagctctgcctgttttccacctgcctctatagttcctgtctccaaccacagagatattccctcatgagtaaggtatctactctgtttcttttccaatctgttctatcgtaaaggaagcaaaaatattctcaaaatgctttatttctatatttatatccagcaacaagtcaacaagagtttttatcgcaagaaactcctatacttttacatttaacttttttgatctttgtgagaaaatattttcaaattcagtggccatattctcttgtattcttgaatatatatatttattgctttcatattttctcatcccctgcacaccattcaaatttatttacaaatcaatctttcttctgatctatcaaatcataactcagatccaaaaaatccaatatctttgcttcgctcacccttccatccaacaacattgtaatccagtactttttattcatatgatatcccgaaagaaaaccataagtctgtgtcagaagtccaaccatatccggttcgcacttcacattgatgatatctaccatgctctcttcttctaatcccaacctagatttttcaacctgcatcagcactgcataccactttccatttttatgccgaagcactgcacttttcggtgatgtttcccagagatactctggaactgttccatattggttttttacatattcaaaaatctcttctcgtttcaaatattccactccctgattactctattttatcaatctcatgattgtactttttgtatttatcaacaggcaggacattagccctgcccaccttttctattatagcattgttcctctgctcctacaatgcaatccattctttgattttttctcattttttaataagtaaccagtccatatcccaaaatggactgggaattcactgtataactattctgctttactgcatctccactatttccttcaatcgtatgtaccgtagttccatcacagctttccacgattcctacatggtcactggctccatcctgattccagtcaaaaaagatgaggcttcctggcgtcggaacacttccaccaccttgccattttctctttgcctgaaacaaagccacaccgtccgtacaaacagaaaactttggcactacttccttttgaataagtcctgcctgatccgcacaccagctgacaaaacaggcacaccattcttcccgactgtcaaatccataccatgaccagaacttctggccgccttcgttccccaactggcttttcgcaatggtcacaagctgcccatttccaaaaagtccggcaaacaatcccccgccggaataatatcgaagcacatggggtacatactccggatcgccataccttggccatccatgggcggctgcctgttcctgggaaacctgcagtgcattggcttcaactatagcccccatgttttcggattgcccatgtgatgtacccattcccgtaattatagccttgtaaactaagttttaacttgtccatatcctgtgggcttttacatccggcttcccagacacaatctgcataatactgtacgcctaccttgatggaatagtctgcatcctgaattgcaccaggcgtattaggatactgggtattatacggacactcgctggcctgcatgggatcggttcctctcccgccgctttcctgcatcatgattgcctggatgaccgatacatattccgggattccaaattcactggcataccgctggatcactggggtatgggccaggacttccgcactcagcggctcactgatctgggaactcccgataaacgcagcgccgccaatgatccctacaatgaggatggtgttagaataggttttttcaggtagatacagatatgcagaatctgagttcttccggaacacagaatcctgatactgcttcagattactgaacatactgccgtctttcatattatgaccgtataagatcacgcgccgatctgtaaaatcatcatggtttctataatccagaaagatacttcctgccttattgttttctttttgaaaagtgtgatagaggtaatactcgttatcttctccctgtaccacaggataatccaacccaatccccggaatctgtatccaggcaactagatcctcattgattttacgaagtccttcaaaatcaatttccttccctgtttccttttccgattcatctcctttcattttttccggctgacatacaggaacttcttttatgtacgccttcagttctttatattctttctgtccatcataatattctttccctatatctatcagttttacagctgcaattccaaagactgcaatacagagtagtaaaatcatcttttctcctatatgacgcatctcttttcctccaacaaaaaaagagattgccacccacaattttaaagtgacaatctccattattacatgttacattttttcagcattatcgtttatcttctccttctgcggatacggattactatagccacaatgccaagtatcgctgctgccataataatcaccggaatccatatctttgtatgatcaccggtttttggcgcatccggcggaggtgttccaggctttctggtattttcaatttcttttgtcacctcaatgagttttgtctcatcatcctgataatcgaataccacttccacctcctctgtgtttgcttcatagccttctaacggtttcgtttccacaagaacatatacaatcggttctacatatttgccctcttcataaactgcaatcggcagttcttcactctttgcagttccatcctcgccggtcatcagtgttccaactacttccccagtagctttattgcgaagttcaaattctacacctgcaagcgaagccttattttccgcatctgtcttctgaaccaggagctggccggatggacgttcatctttcatctctactttctggatttctcccgtttcttctacaacaaaaggaacatctgatacaacaagatatccttccggggctgcctcctcatgcaggatatattcgcccggttctaacgcatacactttatgcggctcttttttggaaacccattcttctactatttctccgtctttatcaaggatctgaagttttgccccttctacttccttttcatctgtaatatcagtttttgtgatttctactactgtcggctgattttcaatctcttttgtaagcgtgataacctccagttctgggttctgataggttgcatcaaaggaccatgtatcttccgttttcagatatcccggtgctgcctccagttcttttaccaaatattttccatgtgggaggtcaacgtcaaagcggatgcttccgtcttctgcggactctgtttttgcaatcagagtaccagattctataagtacattatctgcaagatcaacaatatcttcctccgcatacaatccaaatactgctgcctgtacaggctcttttgtttctttggacaatttcgtaagaacaagctctatcttctggcgcttattttcaagttccatagaaacataatctaccgctacttcctgtccctgatacttaatttcaaattcttttgcttcaggatccagaacaaaatgatgatttccaacgtccgtttccttcagataataagaaccaatcggcagattgtgaagtgatacagttccctcttttccggtcacaagttttgcaacaagtccatctttttcatacaacactttacggttacctgcttcatctttctgtccatccggtgtataaatcgtttcttttgcataaacttcaaaggttataccttctgctcccttcttctcatattggaacatataaccgctgtcttcttctatgacttcctctttgccgaaaaattcactgatagaatttattgtgcctgcgatgccatttttcatttttgtaagaagggaatcttccacattcttagcacccacaagaacttcccctgttttcttgattgtcagacttcctaccgcttcatcgttttgctggcgtactacgacaatatattttccagtttcttcctctacttcataagctgtttcggaattcacagtgatcgtaatggaatcacgttttgcatcttcataagcgcctgtctgtgacaactggtttaatggaatatcgctctctccgtctttcaacgccatttcataccctggctgtacatataaatcaggagcttttacttcttctatgcggtaagttcccatctttaactgctccggtgtcataagataaccttcgtcattcgtttcaaatacatccagttccttttcttccggatagcgcaccttcattgtcacatattctttctttttcacatcatagattttatattgtgcgtgattatttaataccggaagatgtgtctgtgcatcttccttgataatcttaaggaaaaactggatcggtctatcatcaaaaacacgccatggctgcggttccctgctatcttcggtaatggttacaaggaatggattgatggtctggagattttctggagttgtagattcaaaaaccacatattttccatatggaagttctggagaacgtacaaatcctttcttgtccgtaaacagttcttccaccgaaactttcttaccattctcgtaataatgtgccgtttcatcttctgaatagtcatagccgataaaatcctctgctttgaaagcatttccttccgatggtttcagacttccatcttttacacctttcagattctggatcagaaatactttaaacccagcacctttcaaaagctctatttctgtctggtttccatcctctgaaatcttgatcagttcaaatgcctgtttttttaccgtttctttcaccgtcacattccgatgcacgattgcaacatcctgtccttcataaccaacttccactggataggcagtttcatccaaaagatagccctctccaggtgagatttcttttacgtaataatttcccagatacagattcgtaaaatcaacttttccatctttgatcacgccctgcgcaaccagatcatcttttttatggacgtcttctgacttcccattcggatgtttgatatcctctgctgcatagagcccgtaaactgcaccatctaagtctgcatttccctggctgatatattcttccgcatctttatcaatcttaaacacatggatttcccctcgaacctctttattggaaaacgtatgcgaaaattcatatgtataagttttatcattctcatactcaaacaggaagtcatacctgtcagaactcatataataagattccggagcctgaatctctttcaaataatagcggaaattgataggaatatctgaatgaaaagccgcagctccctctttatcagaagtgaccttgtcaatcagggtatccttttttaccactacttttccttctgcattgataatgtcttcacctgcatacagaccgaatacagtcccctctaaagtcactttgtcattttccgatttctttactgcctggacctttacctttggtctgtcattgatataagttgtctcctcctgtaccaattccaccgctatgatacgttacattttccggcagattcaatgtaatataattccgatgatctccctgcagccgaaattcttctgtccgctgcactcattgctttcgtatgcttttgtcgaagttggggtaagatcaatggctgctttaggtggcgcttccagcccatttagatactgaatgtaatcccataatcctgaagccttgacgctttcaaaagtacacccgtaaaatccatctgtgccgcaatacgcataagaagctgcaatatgtgtaaagatatatttcaatttccagtcaaaactcggcatataactgccagtaatatctccaggtcctccgtatccataataaagaactttctgcaaagccaggttactttcaaagatatttgccacataatcactagacggtggcgaagattttgcagactccagacaatatgccacatgcccattcaccgtaaaataagtggtagaatagtttcctaaattagatggatacggaagtctttctcctacgaccagattcacattgacagatcggttttctgtcatggtttctggtactaccgataaaaaagatgcattctccgcagatacatccagctttaagttctccgcattctccggcacttccggtgcttctgtcagtacaggttccgggacaggatcactttcctctgtatcctcttttgaacttttctgattacggtctgctcttttattctctgcttcacgaggtctgactacaatttttcttgtcagttcataacacgttcctttttccggtgtaacaagataagttgcaaggtatgtaccagggcggtctgcaaaaaatccctgtccatcttcgctgacaacatccatgaatacagctttttcaccttttttcaaggcaagccccgtaaaatctttttcgatttcaaatgattccccctgctcaatcgtcaaagtttcggcggtgatctgtttctcattctcatcgcctttttcctcctttattacatttgtctccgattctgctattctgccttttgatgccgcaaatacggcattctcagacggaataagtgcagaacaggataaaagaaaagccagcgttcccgccagccatctgtgttttctatgtttcaattgcaacgctcctttcctgttggtttttgagtgtgattgtgtattcttatttccccgaatcttatgtagggcgttcccgtatgtgcatatgcttcatctcctttcctctggctcataaatcaggccataaaaaaacggaactgcactcttacagttccgctttttcatggcctgattgttttgggacgtatcatgaatctgccagttttactttgcatcgtttcatataacacgcaatcccgtattttaaaattttatccactccgttctcccggagttcttcatcatatttcttttcctctatctgctgtagtgcccgttcacaagcctgatcaagatttccgtcattggcatacttaacttcgataaggataaccgtttcactgttttcggtttcaacgaggatatcgctgtatccttcaccgctttcctgattggacgatacataccattcttccttcacacccaggattccaagcagtatcccatgataaaagttctccttacttgcttttttcacaaacgtatcccggatactgatggtctttttcaggtagctttcaaaaatttctcctaccttcgtttcctcaccgtttttcagggcatcacagaatcggcttaatgtatcgccgtcctttgcaacgctctctttaaagtattccatgatctgtgtttcaaaaatatcccggatttccagattcggtatcgcaagtttataccgttttgcatcaactcttccacgctgtgtcaaatatcccgtcataaacaacaggctccagacgttctctaccgactgatacatttccggatagacaagctcctgatgaatctcttttataatttcctctccggcgagcaaagtttcaatctcacgcttggttttaaaattaccggacatttgaatgaatttcttgacggcatcattactgctggtgttgatccaataattttccggaaaagaatccgcatggtcttttaatttatcacagtaattcaatacatcccaggggcagtacacttctacgccgccaaactgatacccgtcataccagttctttacttcttcataatgatcctcgatttcataatacttcagcatttctcttacttccgtatctgtaaaaccgaaatattcatcataccgttcatctgtaatggacaatactttcaggttattaagtcccgtaaagatactttcttttgaaatacgcatgcatcctgtcatcactgcaaatttcaggctgtcattcgttttcaatgcctgttccaataaactacggattaaaaagatcatctgatcataatacccgttttcaaatgcttttgctaatggaacatcatactcatcaatcaaaagaactacttttgttccgtaatgtttctccaataattccgataatattttcaatccaccacaaaatgcagcctcactcatattattattcaaaagttccttatattctaacttgtcataatcacttaaggcgtcactccccaaaagaaactgaacattacgggctacttttttcatgattcgaaccgcaaaatcaaatgcatcctcataagtggctgcattgattcctttcagggaaattgaaataaccggatatttccccatatactcttcacacagttttgtatcttttgaaatttccaatccatcatagatactctggtctctctctatggaaaaaaagtgttccagcatactcatatttaaggttttcccgaaacgtcttggtctggtaaaaagatttaccattccaccgttacggatcagttctgaaatcagccccgtcttatccacataataatagttatcgttaataatctgctcaaaattttccaatcccaccggaaggcgttttttttcttcacccatgttattcacactccttctctgttggttatattataacaaagatccgcacaaaagcctatacctaactttactcataattcccgtaattcccagtcatcaatgcctttgtaattttcctgccagtaaccttcgtcatccgtatcccaaaccgcacgtttacagattaaatccagcttttcacaaatctcatagagtttcaggcagcctttccgaatatgatttcgtttttccctctttttcggacattctccattactgtctttacatttttcacaaatttctttgtaagcatggtcacagtctaaccgcatacatttatccatatcatttgcttcaatgaccacttttactccttgttcttttaatcggttcagtgacaattccagttccttgtaattggatacgcctggatttccaagatatggctgcccggttctctgagaagctgcttcggcttttaaaacaccctctgtcacataaactacaggagatttcaaagtaccggaaaggcttaccggacttccgggggaacaacctttttccatcttagcgctgctgagccatacatatttccgtttctgaaaaggattatccaaacgaatctgaaatgcaacaagcaatccttcatcggtccacaccggacaaaggtacccttgattcttttcataaaatgcaatttcccaatctccttgataattcacaaagaaccccggtactccttccagtctacatccccgtttgatcagttttctcgctatcgcaacagattcttcaggactggtgcttttataacctgcattttccatatttacaatttcctgttgggtaagtcccctcttcaataaatcctgcttatgtcgtggcagcaatctcaacaaagttataagttcccgatacgtatgatcccgcctctcataatctgcaggttttacctgggattctttctgtttctttttctgacgatggatttccagtttctttgcaatctgttctcttacaccaaaatgcagtgtcctttggatctcatggtatgcttctttataacgttctgtcccatataatccagtcaaatccgcatataacgtcagcatatttcccgccgcatcacaatgaaaacaatgatagatattcgccatttcaccttctttatatacgacaaaattgcattttcctcttctgtctccgcaaaacggacagaccacattatacgaagcctcatcaccaccaggaagtctctcaattcctaaaatcgttcctacatctgtaattgtaaatggtgtcatattcttttccccaaaagaacatggtccctacaaaggaaccatgttcatgcaactgttatgcagccctaagctcttccgattcactttgataatccagaagtgtttttgccgcttttactaactctttattcggacccttatacttatttacgatccatttcatggtttctgtgcctttcactccggattccagaacctgttccatcgtttttcctttgaacacgccaaagtcacacacgaatttcttcgctgcttctacttctgaatccgatgtgtcatcttccagttcctcctgaagttcttccataaaatcagcatcttcttcaaatggaacttcttctgcatttaccgggatgaatccatccgtattttcttctttttctaccgatgatgcttcttctgattccggtttttcttccgttttcggtttgatcgtttcatcttttccatcaaagctcggtttattttccgaatgcttttctgctttttcctgtgggcgtgattctgcatctgatttcatttccaactgttcgcagtctttgacaatcggtgcattacctaacagcggtttcagtttctgactttttttagaagaaacaactgactttttcccttctccgctggaagtttgcttaccttctgcccgctcggtactcttctctactgctttttcttttccatgtacctgccttgtcggattatttttcgtgttggaactctgctttccatcatgctcagcataatccggatcttcctgctcacttcccacctgacggatacagaatttattgcggaaataatatttcaagccataagtcaatgccgttccatgcgccttatctgggatctcatttgttccggtgatatggatcgtcacatgcctgcattcttccggccggtctgcatttgtccagcaaagttctacatctgcctcatatctccagtaatcatctttatccagtaccagataggtctgatgccctgactcatcatactgtgtcgggatttctcgcacaatatcgaaattaactccatatttatttaatgccggtgtcatggcttcataaatatcatccagcgtagcaaaatcataatcagcctcatcattgtaaaatctttttaaaagagtcggcatttttcgtctgattcttaacattttctgttccagattcaagtattgataatttttcattgattcgtttcctcctatttctattgtttatgccgcattcctgcttgcgacgttttcataaagaactattccaccatatgacacactctgtatgtcttcaatccgaaactcagccgttttcccaaacattcgctccaatgtcgctctatccttttgggaacaccctcggatggaataataccctttagggttacaaagctcctccaccgacatattcacttgaataactttctttttacggcaaagaattacctgtactgccttgtgacgggtttcattcagcgcttgtatcaaatgtttaattttatgaatccggtcatttggcgtgtccaagatttcccggaattcgtcccgcacacaaccatacaaaattctctgctgtgaaatatacggtatatttcgcttgatccactgccttgcaatcttctctgctgcctgttctctatattctaaaaacaataaatatatagcatccgaaaaggaagcctccagagaaatttgtggtatgaagtgaatgtccgcaagacttccattctgtaggtaataacgctctgcgcgttctctgatttcactgcgccttaccattggaagcaggctctttgtatcacatccagattggtatagaaagtcctgccaggatgcacttaacatttcttccgctttttgactgatacatctttctgcttcttttctgatatcggctctattcggaaaccccatttcttctgggagtccgagcattgctgtcaatttctcatccacatcatacagactgctatcctttttggaaaacaaccctgcaaaattcaggtcatttccaggtataaggttttttcctgttcttttttgaagatacagatagaaaaagtttccctgttctacttttactacaaccttcttttcctctccgtttttcagtgcctcacaaaatctgccaagcatatccccgtcttttgcaacactttctttgaaatattccataatctgggttttaaaaatatcccgaatttccaaattggggatccgcagcttaaactttctcgcatccacctgaccggactgcgttaaatacccggttgcaaacagtacactccagatattctcaatggactcatacatttccttataagtcagttccggatgaatggtttttgtgatactctccccggccatcaaacgctcaatctccctctttgtggtcagattttttgactgccggataaattccttcacttctgcattgctacttgtagtgatccagtaattctgaggaattgcttctctgtttgtacgcagacttcgaagataggaaactacatcccatggacaatatacgtccacgtacctcctgatttgtaaatccaaaatattcatcaaaatcgacatctgcgatcgtaaaggttgtaaaattattaagtcctgtaaagatactttctttcgagatacgcatacatccggtcagcactgcaagcttcagactgctatttgtttttaacgcctgttccaacagattgcggatcagaaataccatctggtcatagtatccatttgcaaaggcttttgccaacggaacgtcatactcatcaatcagcaggatcacttttgtgccgtaatgcttcttcagcaattccgacagccttcttagtccgccgcaaaaaacagcctcactcatgttactgtccaaaagctttttgtaagcctctttatcatgttcgctcaagcattcactatcgcaaagaaactgaaacgcttctgccgctctctgcataatctgcacagcaaaatcaaaagcgccttcataagcagccgcattgattcctttcagggaaacagagatcacaggatattttcccatatattcgtcgcacagcttcggattttttaaaatttccaaaccatcaaaaatacttttatctccctctatggaaaaaaagtactccagcatactcatatttaaagtttttccaaagcgccttggtctggtaaagagatttaccattccaccattacggagtagttcagaaatcaatcctgttttatcaacataataatagttatcttctataaatgagcaaatccaaaatattgcacaaaataaggacaccctctgatgaataatgtataattgaagtatcaacaaacaacatactcactcaaacaagggggtgtccattgcaaacagtatacatcattccaaccatatttacaattactttaagacattaaatctcggattatttttatctgatgtgtatctgaaccatttgatggccattatcctttccgtttttctccggggataccgcgggaaaactgtggatttccaagaagtaagccattgtcacaggactaccacggcttattttctgaatcatggcaaatgggatgacattgctttacaggataccctcaaaaggagcatcctccatattatttacagggaagctcagcgttccggacagcctgtttactgtattgtggatgataccattgcttcacatacccggccttcgtcacaggctctacatccaatcgaagcagcgtattttcaccaatcacatttaaaaggccgtcaggattacgggcatcaggttgtttctgtcatgctttcctgcaatgggattaccctgaattatgcagtcatactgtacgataaatcaaaatccaagattcagatcgtaaaagagattgcagaagagcttcccattgcaccggtagtttcctattttctttgtgacagctggtatacttcttcaaaggtaatggacagctttatacggaaaggtttttatacgataggtgcgttaaagaccaaccgtattctctatccatggggaatccgtcagaaagccagtttgtttgcccttcatttgcggaaaacagatccgggagtcagcctcgtgaccgttggcggccgtcaattctatgtgtaccgctatgaaggggagctaaatggcattcccaatgcaactgttatcatcagctatccgaaggatgcgtttgggaatcccaaagcactgcggttgtttctctctacggatgtcagtctgtcaactctggagatactggagacttatatcaaacggtggccgatcgaattatttttccgtcaaagcaaaagtaaactggcactggataaatatcagctccgctcccgtcagggaatccaaagatattggttgattatgtcgctggttcattttttgtgttgcatgcattctggaagctattgtgcttttgaagaaggttatgcttttttacagaaacagctaaagcaggaacagctcacaaatctgtaccggtttatcaaaagtggtgcttcaattgaagctgttatggagttagcaggataactttgtgcaaaatttgatatttgctcatttatagttatcttttataatctgctcaaaattttccaatcctaccggaaggcgtttcttttcttcacccatgttattcacgctccttctctgctggctatattataacaaagatccgcacaaaagcctatacctaacttttctcataattctcagtcagttcttctataatcccgccaggattgatgatccgatactcctgcattccgtacgttgcaaaagtacactctgaacgataggctgtttcactggccagcttgtaaaattcatcgaaagtgatcgaatcatctgcctgacatgccagagcgtacatacctgcaacataaggtacgatggaactcattccgccccaacagctataggtataattctcttctccgcaattagatgcatgtgtacttttagcggttggaacatacacgtttccaaaaggtgttgtggcagaatcatagggcatataattattgaagtcggttacatctgtataggagattcttgtcagactctggaatttgtttattttattttggggaatcagacataatacttcgatattgttttctcttgcttttcgaatagcgttgtttaattccacgtcaccttttactcttttgccgttgccgtttatatatgaatttgaatagccggtagaaatcgaaataacccggattttatgttccaatgactgattcagctctatgatacttaaaatatcttcagcaatataggtgaaatctaattcttcctcacgatctggtcggggatcatctataaaataaagatctgcattgggagcaacgcctacattctctccgactgcaatggatgccattgccacaccgtgtataccggcgatctggttttcatcggagtaagattgatagaatttcaggttatctttgatttctgtatggtcaacaagcaatggactatcaatgacagcaataccaatacctgttccatcatactctttttcatggacttcttttagattcaacttttcatacactatatccttctggatagaaaatgcttccaagctttattcaaaatatttctaccacacaagactgtaattttaatcattcttttttgccataatacagtaccagtcaaccagttcaaattctggcattttgaaatatgatggaaaacaatgaacagaaatattcgtataacccatcatcttcagtttacttagaatgaactctttcttgattggataatatttttcttcaaatatttctctttgaactatttgattttctttttcaaatgtatataaaagattaaaagttatagtgttttcagaattataatcccacacttgaaccaaattgactctacattcctttacaaaaacgggattatacagataaaatctctttttttcgttcgaaaatttttcccaatttctagtatccagatataaatatccgccttttttaaccaacgaattcatttgctctaaagctgtaagcacatcatcattatttacatgtggcaatgaatttcccgtactggcaacacagtcaaattgtttatcttcccaacaagaaagcttcctaaaatcacaacactttaattcaatctcatatcctgccgtagaagctttttctttgcattttcttatcatttctttgctcaaatcagaacctgccagttgaacacccaactcacataatggcaacgttacacttcctgatccaatactaacgtctaaaaaagaatgaatattctttccctgtaacaatgttttccaatgtgttttataggcactccagtgtgtttgatcttctaataaatcataaatatcggttctgtcatatacacttgacatttcttttctccttccatttcaatcaagatgaaaaaggctttggataacatctaaaatacaaaatggagactgtatttttctcattataaaatgaggacagaacgggtgtcaatcaaaaaaatacggattgaaaaactggaagtttcccaggaatcttgttacaatttaagaaataatggaaaggcagggggataggatgctggagaattcactggcggaaaaactaatcgaacaggttacaaaatacaccagttataatgtcaatattatgaatgaacagggtgtgatcattgcgagccgtaatccggagcgaatcgggaaatttcacgaagttgcatggcagatcgtgcatggaacaacggatatcatggtcactgaaaatgacaatgaatacccgggagtattaagcgggatcaatatggtaatcgagattgagggaaaacgggaaggcgtggtaggcgtgacgggaaatccagaggagatacgaccgatcgcactcattatcaagatggcgatagaaacgctgatcaaatatgaaaatcagaaaatgcaggcctttcgaagacagacaaggaaggaccgtttcatggagatgttgacgcaaaagcaatatcgcgctccacaggatattcagaaactggcatctgaattgaattacagggaggatttggttcggattccgattctttgtcacctgcagtcgcctctacatcagaatgcctttttatcgtccataaaaaatagtccggaacatctgacacaagacatcagtttcaaaatcgaagatcgttatattctaatcttcaaaacattgaaagaggaacacctattttctgattataagtttttactggcagactatttgaaaagtacgctaaaatggatgcgtgaagaagggattgtgtgcacgttttatataggaacatttcagaccagtttttcgcagtattattatgcgtaccagcactgtaaatggttggaaagacatgcgtcgggagagcatcaggccttttatttttatgattttaccggggaatatcttatgtcttgtattccacgtcaggaactgcagcagatatttaatgtgtttgcaaaggaactgacagatgaatttcagaaaaattatatcgaaattacaggcagcctgatcgaaaataattttaacatccagaatgcagcaaaacagtgttttatgcataagaatacatttacttatcgttacaataaaatccgggatattctgcgcgtggatcaccagcgttcgatgtcagatacatggatgctgatcagtttgtatctatatctaaatcaatagaacgtgtgttttgtgtgcgggacacaaaatataaaagaagttttggtcagcttcttctgaatttttagaaaatcttctgctacaatgaatacaattaaataaaagcaaaaaaacaaagggggctttattatgacaggattaccactcatcatcgcttttattattgcaattgtagttatgattgtagctatttccaaatttaagattcatccgttcttatctattatgggtgtttctttgattctgggattggttgcaggaattccgctggtggatcagacggcaacggacggaaccgttaccagtgggttagcgaccgtgattggggccggattttcgggtacatttaccagcatcggtattgtgatcattcttggagcactgattggaagtattctggaggaaacaggtgcagcactgaagcttgcagatatggtcattcatctggttggaaaaaatcacccggaactggctatggaactgatgggatgggttgtttccattccggtattctgtgattctggatttgttattttgaatccaatccgaaaagcattggtaaaccgaacaggcgtatcgtctgttgcaatgtcagttgcactttcttgcggcctgtatgtctcacatgtatttattccgccgacaccaggaccgattgctgccgcatcaacccttggaatcggagacaatctactgatggtgatgggaattggtgcactttgttccgtacttccattgattgcgggatatttctttgcaaaatacatcggtaaaaaagtaaaagcagacgacgaagcaaactgcaatgacgtgaaaaaatcttatgaagagctggttgccgaatacggaaaacttccaaatggatttgttgcacttgcaccgatcctggtaccgattttgttaatggctgcaagttccatcgcatctatggcaggctggtccggggctgcaaatgatatcttgcagtttttaggaacgccgatcattgcacttgccgttggtacgatttttggagtaatccagcttgttggggcacagcggattgacaaattttataatctgacaaacgaaacattaaaaacagtaggacctattttgtttgtaacggcagcaggtggtgttcttggaaaagtcattgcttctacaagtatgattgaatacattacacaaaatgctgatttgcttgagacgattggtattttcttcccgtttattctggcagcaatcttaaagagtgcacagggttcttcgactgttgcattgactacaaccgcagggattgtagcgccaatcttgcctgtacttggactggattctccaattcgggcaacacttgcagtgatggcaatcggcgctggcgctatgacagtttctcatgcaaacgattcctatttctgggtcgttacaaattttggcgcaatgactccggaaaaaggatacaaaacacagacaatggcaacgcttgtgcttggtatttccggtatggttgaaatctttgtactttcactcttccttcactaagaaaaatacatatggaaagggaggcttatcactatgaaatttttatttgcatcagattcttttaaaggaacgttatcttctgcgcgtattgcagaactgcttacgacagcggcaaaagaatcctttccggattgtatctgtaccagtattgagactgcagacggaggagaaggtacaacggatgctgtattgtctgcagttcaggggcagcggattccacttgtggtgtgcgggcctctctggaaaaaaacagactgcttttacggaaaactggatgaagaacgtgcggtcatggaaatggcggctgcatccggtcttccactgttgacggaactggagcgagatcctagaaaaacaactacatatggaaccggagaaatgatcctggatgcattgaatcgtggatttcgggatatttcgatcgcaatcggaggatctgcgacgaatgacggaggaatgggatgtatgtgtgctctaggagttcgttttttggacgaaaatggcgagatcttgcagggatgcggggaaaatctgagtaaaatttctgaaattgatgtttccggtcttgatccaagagttgcaaagacaaaatttacagtcatgtgtgatgtcaataatccgctctgtggggaaaatggggcgacctatacattcggtccgcaaaaaggaggaaccccggagattttagccgagttggaagatggaatgctacattaccgggatgttcttttgagggagtttggggtggatgtcaatgaaattccgggagcaggtgcagccggaggtctaggtgccgcactggtgatctttttaaatgcggtactgaaatccgggattgaaacggttctggatctggttgattttgacagcaggcttcagggtgtatctcttgtggtcacgggagaagggcgcacagactggcagtctgcgtttggaaaagtactgcatggtgtcgggatgcacagtaaaaagtacgggattccggcagtggccattgttggctccatgggacagggagcagaaagaatctacgattcaggaatcgattcgattctaactacagttaatgccccaatggaactgcatgcggcactggaacaggccgaggaattatacctcaatgcggcgagacgtctgtttcgaatgctgaaagccggaaatgagatgaaacagacagattaaaattcctgcaaatgacaggaattttccgacagcagcgcctggtgcatggtaggaaatttggattttgtgttttccctgtttcagcggaaagccgaggaatgcagtatttactttttcataagatactttcttaccatccaccaggacttcaaaatgagagtcataaggaatggttgtgataaaataacttttttgatgaacctggatcgttcccttgagctgatttcctttggaagcatttttatccgcgtgaaattcagactggtatagtgtttcgtttgaagccgggtcctgccagattcccagagaaagctgcaaatcggaaagctgatagcttccttttccaaggatgagggagatctgctgctgccctttttccaatggaaccgcatacgtaaacgttgtattgtggttataataaatgtgtgatctggagcttaatttattccgttctttttccagggtgatgaacacgtcagaagatgtttcccggttttttacatcaaattgcaggaataaaacatgctcctgctcattttgtccgttctcattccagttcggaaataagtctgcaagatctaaatgaagagtctcggtctgttttaatactgccgttatggtttcgtctgtttgtgtcagagtgtttccggtcttttggagagccggaagcgtcattgttccggatgtgatcttcagactgtcagaatccggagcctctttttgtccccctttttctaccacagcataatctaaaagtgtagtctgattgtacggaaacggtaatgtatcataggtctgtttatttagcagccggttcgttgcataggcaattggtgatacattgtcatttttcagaactttcgtatttccgattgtacagtcccattgatagccgggaacatcctcctgagtgatcagatatttgatgcccataaaccgttgatagacaggatttctggaaacagactgcattagaaagttccgatagggctcttccagttcaaacgtctttgtccgaaattcctgataatctgcattatatacagaagaatacacagagctgctgtactgtccggtgctccagatgcgattgagatcggcaaactcttcttttagagtaccgatttgttccatgcggtaaaactcttgttttcgtgtgacaaattcggttgcttttttcgtttcataatccgttattttctgataagaaccggaatccagcatcgtgtctgcctgtgtctggaaagactgatcgtagattccaaggaacaggattggcgggatcaaaaggcacaaaacacttctggtgcgaagtgtttttctgtttgtccggattccgaaacgagtcaatccataaaagagcaggtagcatcccgccatgatgacggcgtccagagcaagtaaggatcggctgaaggacggcatggattctgtgtttccggtaaatatcagtatgatcgtcagaatataaggcagaagtccgcgccagagtgggcgagcttcttcctgttgtttttgcatatagcaggcgatcagatagcataaaaccggaagaaacggaatcagaaccttgtcccggatgtacagtccgccattgagcagataagaaaagaacggaatcgtcagaataaggatcgtgctccagattaggatccgttcccctcttctcttccaggcaagtccggcgatcaaaacggttaggatcagtgttgtcagtccgattgcataaggatgataaagaatcgcggataattttactgtaggaataaaaagagaaagatctgtcggtgttgttttcccttctcttccgccctgcaaagccattgcggttggtactaaaaagaaggcgcttaaaaggatcgcggtcaggatcggacctaaaaaccggattccgtctctgagaaaatcaagaaactggattttctttccaagcgaatcctgcagcataaagtatcggtgcagtccgtataaaatcaggaccagaattccgccgatactgaagtagaagctggtcatgatcatcaaaaatacaccggataaatagagaagctgttttcctttttccaggaaagaatccacaccccaaagagccatacacagaaacggcatataattgacaaacataatctggttgtaagactgaaaaatcataggtgctgacagcaaaaacaacagtgcagtcagaaagctgacagtctgagagaactctctttttatgagccagaagtaaagcaatacaactgctgatgcaaggcaggtgaaggatgctgcgatcagataatcgctcattttcacaaaaggaagcagataggacaacaaaaaaacaggactgtacagtccatagtaggcaaagttataaatgttctgtccgcctccgatgcccgctgcaaattccgggaaaaaatctcccgtgtcataaaactgctgtcggaaataatccggaaatacgctgtgctggctgatccagtctacttttgagccgaatactccatatctcccgcaaaataaccaacagaaaaacaaagtgaaaagaatcaaaagaaaagggatcccccattgtttgtgtctagtgttcgtattcatagtgtgtcctcgtttcctcttcgctggaatcctttaaaataaaaatcggccggtgttttgtctccagatatgtcttagacaggtactgtcctacgattccggtacataaaagctgcactccacttaccataaagatgatgcaggcaagagaaggccatccggatacagggtctccccagatcaatgtccgtacgatgatcacaatgatcatgacaaaggaaattagacagaacaaaagtcccagtacagatgccagtgacagcggcgccacagaaaatccggtgatcccttccatggaatatacaaacagttttcttaaagaccactttgtctctccggcagaacgttcgatattttcatattccatccattttgtgcgaaatcctacccattcaaaaatacccttggagaatcgattgtattcgctcattttcagaaccgcatctaccatttttcgtttcatcagacgaaaatctctggcaccgcgcacgatttctgtcttggagatccgattgatgaccttgtaaaaggtttcggataaaaaggaacgaagctttggctctccgacccggtcagaacgtctggttgccacgctgtcatactcctcttctgccagaattttgtacatctgcggcagcagtgccggcggatcctgcagatccacatccatgactgcaatataatctccgccggcattggaaagaccggcataaatggctgcttcttttccaaaattacgggaaaaagaaaagtatttgcagcgaggatctttttgatgcagcgccttcatttccagcagtgtatgatcagtggatccatcgtcgataaataacagttcaaagtcaatattctccatttgcttcataacaggctgcattgcctgataatatacaggcagagcctcctcttcattaaagcatggaataattacagtaattgtttcagttctcatattctgtctacctcctggaaacgatgatactggtattttcttaaaaaaatcaaaaagtaaatcttaagattgcttaaagatttaataacgattttataagctttatcaatgtttttgttgtaagtgtgttgtaaatagaatgtttttattcaataagattgatacaatattcacccctcagagaacgctctccgaggggatttttattaaatagatgtggtctctttactgtaaattaccgacatgagccttgcataccatggcgctttaggactccacttgtaacacggcatgtccttaccattgttgtccttgtaaatctgctggatgatttttagctcatccggatgtcctaatgttattactttttgaccgtcaaaataatacactgcaccttttccctctactgtaaataaacatttcatctcttcttctccttcctgttcgattcctgtattctggttatttttttgttcgctgcatgcagacgctctactgtcaatcgcctttgcaatcagctccgcaattccttttgtacctaaatttcgatatctggccacatcatctgtgccagtgcagaataatgtctccacgatcatgccaggcatattagatgcattcagatcatggtatcccgaactgtactttacaccacggttagcaaatcctttatttgcgaaattctggcagatattgcttgcgatcgtgttcattgtctggttagatgcatcgtataaccacacctctgtaccgccagctgattccgctcctgccgcattcatgtgcaaggtgacatagatatcgcaccccgcactattcgccttatttgtgccgtcagacagctcaccagacacattggatgcgttggaattacaatcaaccacagtatgaccgacagcctgtaacattggtgcgagctcattgtagatcttccgcacttccgcctgttcatcgatcagaccgattgcacctttacaattcggggaatgccctccccttaagccaattttcattctttctcttcctcctgctcttctgtttcaaatgctttttccagctcctctacggataccctgccaaattcgttctgttcgctcatgttctcacctcctttccatgcgatgtcgcacaataaaagagagcctgttttcaagctctctagctatttacttatatgtaagtgccctctctgaatctcctgttccaggtgttgttgggtctaccactacaccaaggattgccagaaccgcaaagagcgcattaattacagtcaataacttgtctccaaggtctccgagatcgatcgcaaatccaagcactgccgcaatagcctgcaccaacagcaagagtgccgggatcagtgctacccagaatgccttgtttttaattcttacaatccagttaatcttcttcattttttattctcctttacaaatatattgctactacagccccgatcacggctccgattagcgttgtcacgaccccatcccaccgtttggctggtgtctgctccagatgtgttacttttgcggtcagctgcaccagcgtctggttcataaagccgacctctttggtcaacccaaccatttcctgtgccagctggtgcaccacattaacaacgtcctccgcttctttcattcggtgttttaaagagccgatttcttttccgtgctctgcaagtttcacttctacttcattttctgtcatgttttccctccggtttttaaagtataaaaataagaccaacacggtcttgccctaatctccatataatctccttagtcgtccgtaacccaagtgatcgacaaaagtcgctctgtccaattcgggttctcaacgaaaattgtaattcccccatcactgccaattatataccgtccagcgccaaacactgacgatccggacacttcgatatacggcgcataaacatcaaacaccgggcgatacccgtctgggattctcacttcatcgaatgccccgtgtcttccgctgcttggaaactgggaaagcattgtgattttgcatgcaaccagacatcctcttctttttaattccacacggatgttatttgccgagtttgcacttgtatatggacctttcacggtaccggaatcgtaagagatagattttgtaagctgcttaattgtcctaataagccatatgctatctccatttatgtttgtcaccgaaaagtcacgcatctcctcatctccgcgaatagagcataccatagatccattcgcgatatcatctgccatgctactgccgccggaataaaattctaatccagagtagtttaatcgactcccccagtacctagccgctgtaaacgatcttaccatgtcaatattctctttttttacaaaaacggaaattgtaccgtcactgcttttagacacgatctctccggtgtctacatttatgtaaaagtgtccacccttactcttaataagtccggctgttacagttccaaggttggcaacgatcgcactgagcgtttgcacgtccagattctcgactgcgatataatggatcacccacctacttccatcccaccgcttgatcggctgaccggatgccgtttgccataactggccaactttaggatttgatggagccgtagaagatacaattatgccacttggtcctgttgctcctgtagcaccggtcgctcccttatcaccatatgctccgatgatacatggtgctgattgatacgtgctgccatttgtataggtaacaacttcataattccacagatatttttttgacgccgttattgcttgtacagttgtagtccatcctgatgtggacgccgacacaccgcttccgcttgccgttgcaagataataattcgtgatagactttattccgtttccagttgctccttgcggccccgttgcgccagttgccccttgcggtcctttcgggcctgtcgctccttgtggcccctggggacctgttgcacctgcatttccttgaggtccttgcggaccagtagctcctgttgttcctttgtctccgtatatcccgattatttttggcgtagtggtcgctgtggtattatctgtaaacgtaaatttttcatagttccacaagtatttatttgttgctgtcatcgtcggaactgatgtactccaaccgcttgacgctgttgtaattcctgtttttgcggaagaaatcaaataatattctgtaatggtttttatccctcttcctgatgtccccgccggcccttgtggtcccgttgctccttgtggtcctgtagcaccttgttctcctttaatcttcgcccacttataagatccaacacttgcaggatcggactgattgtaatccacacaagtaccgatatgcgttcccacatcttctccgctgtttccggtaaacgtttttcctccatcattggaatatttaatgtgcagataacttgtcttgccgtttgtgccgtttgttcccggaattccctgcgttccctggggaccctgggctccttggaaacgtgaccaggtatatttctttggatccgtgctatcttcccgtgtgaagtctacgtaagtaccaatatatgtgttaggtatctctgtcatctggttagaggtggttggattcgatactgcggaatacttgatgtgaaaataggtgctcttccctttaatattggttccgcttggtacaggtctgctatctaagacaggtgctgtctgcttataatttccattctgccatgtatatcctgttggcttaggcgtccagttgaccacaaaatcagtctttacaaaatatttaccgccacctcttaaatataatacagggattgatccatgagtcagttgtgtatagctggcaggcgacactgaacagaatgaatacgtgtctgcataaataatacattcgccagaagtagctccccacccagatccaatggaagccagatctaaattcaccgagaatccgctaacatgtgtactccaggatggttttgttccactatttaaagacacattaaccaaaatacgattataaacactcgttggaagctgactccccacaacgggataccatttatttacatcgtaagttttagtatcagataagtctatcgttgctgatgatctccagtagtttacacctgcagctccagtatctcctttgggaccctgtatcccttgttcacctttgggaccttgcactccttgcagaccgggaactccctgcggaccttgttccccctgttcgccttttatttttgtccatgcgtatttcgtcgggtctgtagaatcctcttgcgtaaaatctgtatactgtccaatataaaacttcccagtgctgttcgaaacatcaaaccctgtctttccatcagcactgtttgcataggcgatatgtaaataacttgttttcccatctgcaccattcttaccagcaattccctgatctccttttacgccttgcgatcctttaaactgcgaccaggtatatcttgcaggatctgtagaatcttcctgtacaaagtccacataagttccaatataagcagacggcgtctctgtcatctgactgaacgttgtcggctttgccacagaagaatacttgatgtggaaataactggtctttccattcgcaccagctgttccaggaatcccctgttcgcctttttctccttgcagcccttgtagcccacgttccccctgttctccttttatttttgtccatgtatacttcgtagcatctgtactatctgcctgtgtataatccgtgtactgcccgatatagagcttatttgtaccatccgtggtggaaaatcccgtcttgccatctgcactgtttgcgtaggcgatatgtagatacggggtctttccatcagctcccggctttccgggtgttccgatcgccccgtctgtgcctttgatcttactccatgcgtattttgtcgggtctgtgctgtcgttcggaataaaatcgacatacattccgatatattcccgattactgtcagaaacagaaaaatctttagacccatctgcgctgtttgcataagcaatgtgggtgtactgtgtttttccgtccttcccatcttttcccgggattccctgatcccctttaggaccctgtataccatccaatcccggagcgccttgtggacccggaggtccctgttcgccttgctctcctttctcaccttgcgaaccctgttctccatccattacatctgcgatcgtaacctcgtaatatccacgctttactccgctttcgaacgccgtaaaagagtacactgcttttacatccacatcctctgcattaaccgtaacactcttgccaacgtaaaactctgtcccatctttactccaccggatttccagattgcccgtgacgtccacgccgttatcgtaagcgtaagctgtcagagtagtgctgccgataccatttttaaagatgatgccattgttggtggagatggaacaagtgtagaccttatttttgttgataagatcttccatcctctgcaacaagctatccgaaatttcggatgtaagctctttgtagtttgtaaataccgtctttgcagtttttggattggtaagactgcgcacctgttcggacactctcgcctgtagataaagcactggtgtccactcctgatcctgcatcctcacggtgtccccgatgttggtgtcaaaatatccgtccacctcgtaagtcaccaccggttcagatgctgttttaagatcagacagagccatgctatagagcttgtccttgctgtctgtatcgtactctttacgcatcaggatataagcatcagccttatttacgatattggacggaaaccggtctcttgcctgtggtgcccggatgatcgcaccgtctgtaaagtactcgatattcccgttttcatcgtattctttcttgtcaagaccattgattgtcagaccgtcctttccggtcggctggatgcaggtgtaaagcttctcggcatctgtggtttttcgaattccggtaattcctttcccgtaccgcagtacaatgtcattccggtattctccgactccgctgtctgtatcggagtgtttccgatatacatttaggacaatctcttttaaagagtagtctctgttcaatactgtctcaaattcgatctccgcagaaaagacattagccagggagaataatctctttaatacggacgttgtacctgtccattcgttggtgattcgcttgtctgatacctcattgagccccagttttagtgttctctcagcatcaaaaacggcaaggtactcctcaaagctcattgcttttccggctttgtactctccggcatcctcgttgattagctcaaaagataacgaccacgccgtagctgtgatcgtctcctctgtctgctcagtgtttacgatgtttagatagtaggatttccctttgtgtataaacgccaccttattcccagcggtgacatgctgcgcgtctggatgctttgcattgacagtaaaggtgtacgcattcgctgtaccctgcaagtattcgtgcagatcatcattccagtaatgcatggactttttatgcccgttgtccatgtatgctactggcgtgttatttgtgcttagaatcgcaattctgatgttatccattacaaatatacctcccgtatttttgctttaatctgtggcggtggagaagaaaaggaagaatagcagaactgcacttctgttgttccgggtggcactttaaaatagtccgtccccgtaatctcatctcccttagccaccatcccattaacgtagaccttcgcactctccccgtctatagacaccacatctccggcacggtaccggttcggcacatctcggtatttttccacgttatccttacggaaccagatactttttaaataattgtgcgtaaccagctgatttccaagatctctacttccccactgcccgatccagacctgtatcttctcacacaccatgtctttaatctccgggatagtaaagtggtaatacttcccgtaccagaaaatacgcaacttgtcaccctcttttaaaaagtcattgtgtccgccgcccatttttaaattaaacgggttatcctcgtaggatgtcggctggaaatccagtgtcttaattttcttgttttgaggggcaaaccagtccacatgcgccgtattgccaaccgtatcactcttgttaatagacatggcgcatatcaccttgttatctccagtcaggaatgcaatggtctgcgctccagtctgtcccatcaaacctgtctcgaaccagtgctgggtgtaacagtaaaagttcttcgctccacgtctgccctcgctgtccaccgggatagtaagcgttctcattccgccgttccagtacccggatgtggattgtccaccttttaatgccatcacgttatatccggcaacattccttacttcaagcgtcccctgtgtggtgttttccggattctgataagaggtgccatgatcatcttgaaacaagccgtaaccgttaaacagttcttcggacgcttcgtagttctctccgtccgcctcttcctgttttccgagctggatcactccatactggctcacaagtccgataaatccgttttcgtgttggtgcgtgatctcgtagtccacgtctgcccattcggtgccgttgttttggatggtaatggtctggtatccgtcttgctgtacaccgtcaaattcaaattcgccgacagagtacgctaccccatccgggataagccaagtgattgtgcctttcccaaaaatcgcaacctgtgtcacatcaaggtttccgtccggtatcgcataaaagtagcgatctggataattcccaaaaacaagttttttcggctctgtgacgtttaggattttctgaatcgcgtcatagcttgctaagatgtctcctttaatttcaaatggcatttcaagcgtctttgatttatatgttgtatagccaaaatcctctccttttgcactttctgctccgtcaaggagtcctgactctctatttactccactaaacggagagaacccggacaatacacttaagtatcgcccgagttcctgatcgtcaaattttactgataggctcaatttctatcccctcctaacatcttccgaaaacttgaattcttttctatttgtttttccattggtgttgcaagtactctggatgtctctacagagtcaattttattaacaatctctagtggtctgttggcaagtctggatagacgatctactgcgtagagtagctcgttgttattttcagacttccggattccagcgcttttctggtaagtttgacttccagcactttccggcactgataacgttataccgctcacagatgcagacaactgagacaccaccttaccggatacttttttcatctctttgtacggcatgtactcttcgtatccggcaccgactcccatcgcaaggtacttaccaacctgatctcgcataactctggacggggaatgaatgccaaagaaatccttaatggatgaaactacactgcttgcgaatcctccaatcttgtcaataatccatcctgtcatgttcgaaataccattccacaatccctggacgatattgcttccgatagaagccatctgtcccggaatagaagagatcgtgcttacaatggcgtttacaatgtttgaagctgcacctttaagagaacctacagctgacgatataacatttccaagtcccgacattgcagttcttcctatgttcatcaatgtatttggtaaattctgtacagaagtcttaattccttccaatatactttccccgcattgcttcacgaatccgaccatagacttaattccatttcccagtgcggttataatggttttaccaaggttcagccactggaatgccatcagcacgtcaacaatagctgctataatctgcggaatgtttgcaatcagagttggtattgcctggataagtccgagtgccaactgtccaagtaattccgcgcccttcataagaattgttggaaaattgtcgttaataatgtttgcaaatgtagaaataatctctgggactcgctcaatcaatatcggtattgcggttacgattccctcgaccaatttctgtagcaactcaaaacctttttgaatcattacaggtgcagcttctgcaagtttttctccgatgccctgtataaaatcaagcactttcggcaacgcttctggaattgcctttacaaatccgtcaatcagattgcttaacaattcatagccttgctgcagcagacttggcccctgcgatgttatctgctcgtatagagttgtaataagctgagttataagcaagccgacagacggcaatacctgcatcataccgcttattattgcctgtatgatctggatcccagacgacaacagttgcggtatacttgtgctgatattttctgcaaacgaacttataatctgtgctgatgcagtcacaattccgggcaatgcttgtataattcccgttgttatgttggaaatgacttgtccacctatctgcatcatttctccgagttttccggagttaagtgactgcgaaagactttccatcaacaggtttccgacttctgggagttcttttgcaagtcttgggacgatctgcatcaaattatttgttatattttcagctgcggactttacagcatctgccaactcctgaggtgaacttgaaccattcaaaaagttatcaaacgccgcttttgcggattgcacagaaccctctatggtagtcaatgcttcttcgcttgtcgttccggcaatacccatattttcttgaatcttgtggattgcctgaatgatctggtcgaacgacacattgtcaagattctctattttttcgttgagaatgccgctgtcgttaatcaagcggatcatttcagtctgcgttccaccatatccaagtttcaggttatccaacattgtgtagttctgcttcgcaaatccctgataagcgttttggatatccgtcatgttggaaccaaatttatttgcattgtctgacatgtctaccattgccatgtctgctattctggcggcttctgcggtattgtttccgagtccctgtaaaagtgatgcagaaaagcttgttacagtctccatgtacttatttgcagatacgccagctgtcttatacgcattgttcgcattatcgatcactgtctgcgcactatctttaaacagcgtctcgacaccgcctatgttctgctcaagactcgcaacggaatcaagagacatttttgacaccgctccaaatgctgcagcaacgccagctactgatccggcaatcacttttaatcctccgcttgcaacgctgccaagtttggaaattcctgaattgaatccggattcgtttatttttgtgttaaattttaatgagccatcataacccatactatccctcctttatggatagcacaggctcaatggctcaatttaaagtgcttaaatcttaatctctacttcttttttgcacgtccggcacttgataaatgcattggtgcaaacggaattgttgttataaatcaatagcttgcacccgcaaaaaggacacttataccactttctctcaagtgatggttttttaattttacaactcatctgtcacctcacataaaagcatttccgatatcataatccgtcaggctctcagatggcaattgaattgatttctggatctttttaattcgttttttctcttctttgtctttaatttccgataaatcaacactgcggtacattattcgctgtttaatctctgtatcgtcagacaaaccatcaaaaagcatccggaatttccaccaatgcatatatttaatgtcgattaaatcaattccataatctctgagaaagccggataatatatatggataatcaatggagtacgagaataaatttttcttcggcttttcttgcaacttttcttgcggttcttcacaatcacctgtctccgcaacctttgcacagtttgtatccatcgttataaagtgggacaatgcgcttatagcttcttcatctgcaactacatcatcaataaaatactgctgtatgatcgcgaatttttggagagcatcaagctcttggtctttcaacatgtccaaaagcctgatgtattcacggaaatccgtaataaccttgatattttcccctcttacatttactgtgctcggtaactcttcataaaaaaagttcattatttcttcgcccgtctctgtgctctattcggtgtgtatttgctaacaacagagttccgtctcttatttacggcattgatttctttttcacatacagcaatgaacgaatcatagcactcttcgcaaactctcaaattcattttcccgtcaaaaagtttttcagaagtaccttccccgaaaattccgtcaaaaatatcataaaacaacaaacaatattctctggttatttccgatatcttcccaaccttttcaaggttcttctctctcggctcaatgctttcaaatactttttcgtatctttccaaaaactctacgtcatccatatctatttcaagttctacatcgttccatttccactggctcattggctcactctcctattctttctcgtattttttaccgccttaaaatcggcggcagctactcccccatgtaatctcccttggcgtaagtaactgtcttggatgtaatgtcagtttccgtaacgtatccttcctcaagatcggatacagctttcagcgatccattgtaaaccaatgcgtctgttccatctccgtccgaatccgggataactgcgtaagttctctttgttgcgtaacacttgtcaccttccgtgttctttttgtaaaaatccaccgtgaccacttccacatgtgcatcatccgcaactttctcaccgtcatggatttttgcaattcgctcatgtacaggattccctgcatacatatcaaaagagtactctgtagccggagcatatccaactacatctgatctctcggtgctttcatccacgtactgtctggaatactctttcgggtttttcccgtttgtcattgcggtaaaattggtcattctttcaaatttcggagagctgcccgttgcatccgtgttcatgaatgccacacgcaaatgtctgcctactaattttggtgctgttcctgacatacttatacctcctgtgtataaattaagcggcactcaatacgatactttgcgttttcaccgttcatatcgtacaagtaaccgctgtttaaagtttcaattgatattgggttcttcttttctccaagctccggcaggttattattgaaactctgctgttccaaccactcttcgaagctctggaagaatccactgttttcaatgttaattcgcgcgtcttggtcatattcttcttggcttgtaaatgcgaattggaactgcttctttgccccaccgtccatgtatctctgcatgatcggatcgcaagggagagggtcaacagagtaccccatatccgttccaatgtagtccacgttcacacgtccatcacttaaaaacggacatgtgagaatatatgatctgacgctgtcaatgagatttgacatacttagccgctcctttcaggatagagtctttgtgacgatttttcattcgctcaaaccatcgtgatttttccttatgctcataatattgtctacgtgcataaggtgcgatctggttaatttctccacttccgatcactgttccaagtgttgcagatttaattaaaacgccggatctctttggtgtttcaggcgccattcttcttacgcattcagaatcaacaaaagactgtgcgtttgcgaaaccggattccatattcggtctaaagttcggattccagtcgagtctcgctattgtccttcctttcaaatttcccttggaaatcgtgtaagttgatatcttacctctcggcgtctcaatctggaattttttctttcctcttgccattacactcccaccaccttaatatgcggattgccgccgaatgcgttgtagtttacggatgtgactctggtcttgtcaaatccgtccaagtctttgattgtctgcatcacaatctgacaatctcctttgacaaggtaatcgtctttttttattgctacgctcgtgtcagagatcctgattgtgtacgtatcagcctgttttaatccatctgtcgtgatctgcgacttttcgtttttgtaccaccacacttccgggatgtaggttcgttcccactcatccagccgagtagacgggttatacttccggctgtacagggtggcgtctgaatttgttagcatactccgcgatacagtaagccggtattaccgagatagactttcgcaatccggtacagcttattctcaagcactttttccgcatcctgtccgtcaatacgctctgttacataagacacagagtacccgtctgtattttcggattttacgatctttccgtcatttgctgtcaaattatagatgacatcgcacatctcacaaagacacgatttgatacggtgctcattttccgtgtcgctttctgctcttccggacgtgaaatcatacatataaacatccgcaagatcacgagtctttttaaacgcggactcagtggagattttctctccaccaaagtcctcaatgtagtatttgtaatctactaacatgtgtactccttactgattcgccataatcccctgttttttcatctccgcaagaatctcattgattttatttttcaggtcagttgttgtttctgtggacaaatctgcaatcaaagccatctgtttcacaccgcccagcgttgttttgttcgccgctggaagagtgtatttatttgcctgtgctgcaatgccatctaatttcgttttgtcctctttagacatcaaaccatctttagatccggcaactgcattaacgagttttccctcgatctcgctgatttttccgtcctgctgtatattttttgtatcatttgcagatacgccgttctcaatgttgtccattgctgcttctgtaattacttctccgtcttcccagtctttctttgtgtacgccatactatcacctcgctattttgctttacctacttttgcctttccaactttccccctgcctaccaaggcgagatcttcagggggtgctattcccccacgtgatgacagtaaattccttttactttattttcgtaggcatcacacattccgactgttctgtatgcgtacatataagcatcagcagcctggttctggtctggggaaataatcttcggaactgtgtgtttctggtactggatagccgcgttccggtcaattgccataaagttgattgcttttccgtctgaattcttagcgaatccaccatctccgtttgctgtcaagtcaacttttgtgtaaaatcttgcggacggtactttcacgattccagcccatccttccaatgctcttctggatgcagttgtatctaagtcttcaaccattccaaccaatgctggattgataaacagatagcatgtagatacatctccctctgcatcttcgatcgcgtttcttgcggctcttaacgctgcaagtgctgcttttccatcgttcagtgcgccttctgctgttgtgataccagaaatctgtgcatacttggaaaatctccatgcatccaactcgggcactacctgcgtgcggataaactcccctgcaagacgtccaaatgctacgccagcagactcaatattatccattgcatctacattaaatttacgacctctgtcgtagtcgcatttaactgtctcgtagtccagagttacatcaccgttgacgtatccagaggacttatcatagtttgcaagtccctgcatggacattttcggaatcaaaatttcgtttgcatttgctccctctcggatcagctcactcgggccatctaagatagatgtcagtgaacttttcttatacacgaggtcgagcatcgtagaatactgttttctaagcgtaattgaatttggcatatcttatctccttatcatttaaaatctttttctgtgagtcccatagcagcagctaccgcatcaaacgcacctggcttctcggctccgcttccaagcactggatttttaatcggttcatcatccgcaaacaggaatttgctttcttcgttctctttcaggtctttgaatgcattttcaatatccgtatcctgatttttggatgctttcagatcatccgtttttaagtacggaagaaccgcttttaaagctcttgcaccgtgcttcttagctgcggcttcaagttttccgttaaactcataatcctgtttaatctgcgctttctctgcttcggatgcttcgtattttgctttgtaatcggctacctgacctttgatttcttcatagtctccgaatccctcaatggctgtgtttgcgtctgtaagctgctgttttgtcgtgtcaagctccgatttgatgttgtcataatctttttttgctttaccgacatctgtggaattggcgtccagaatcttatcaatctgttctttttccaatcccatttcttctaaaaactctcttttcatgtttcatcttcctttcgcttcgctttttctcgtggtcgcaccacatgtctcaagtaagtacccagtttctcgtcatctggcaggacaaaataaaagagccgcctatgcgactctccctaacatatccatgtatatccgttctctttgttgttctacgcccatcttccgacagaactttgtgtattcgtacagttgggctttgtattttactctcatggtcaatatattgtctggatctgctctggcagtcttgagtgccatgatcttagaccgctgcgctctcattgcggtttccattcttcgctgttgctgtgtaattccgtaagcatccaactctttaccttgccacctctttgttttgttttctatggcattctgcttttttaaccattcatccgtccactgccgttcagacgctccttttacaaatgggtaataatcgtggtagcagttagctccttgtaggccagtagcagttccaagaccgcacacagacgccagttcttctttgctgtacacttttccttgccacttccggtgttccggtctggctcccggatgccagtcaacctcgtaataattcgtgccaagcttctcagcgttgatcctgttcacttcccctgtgatctgcgatactccggtcaatacgcttctccggactgcaacgtgcactctgttgctgtgtccggtggcgtagtctacagtccttaagccactgttcgtcatctgtgtaacaactctacggatgactgtgttgtagtcaaatgcgccgcttatcacgtctgtgattgccatgtctacatatcgctggtaatactctgaaaacggcataaatacgcgccgattacccatcaaaactgagaatccataagaccttgcaaggttctgcaacttgtcctgtgtctgcttcctgacggcctgcgacacctgtttgagctgttcgttttcctctgccggaataaattcccggttgatctgctcatataagtccctatcccttacatactgccactccgctatctcgtcatacagcttaaacatctctggataagtggctttaagagcatcttgtaggattttttccacctcttctgtgctctttcccatctccaccagtctgttaatctggtaatcggcagtggatgttatcttcccagtctttcgtatcctgcgaacgatatcctgtataatccggttctcggcgtccatccagatagattccatcctaagagacattttttcgacatctggcttatccattacctatcactccattactccaccttgatccggcacattcgcttttgcagtcttttcatcttccccaagaaaccgtaccctgtattcccagtgtgatctgattccggctgctatctcatttaacatcaactgtctgtccgcttcctcatccgttagaatcgaatctttaaaactgcagataaactcatatccggaatggagcatcccctcgtggaacgccagacctcttgcaaaatcatctaagcagtctcttaaattatcttggattgctttgacgcggttgtacttcctatttttggatgctttcacttccgttgctgtcttgtcgatgctctgtggattgcttaaatctccgaatgcaagtccaactacaagctcaatctgtctaaggtagttatccagaccgtttattagattttcttcccggaattccggtgagaactctttgtaaaatccttcctcgctgtcaattccgacatacaagcgcttgtttagcttagacactccatttcgtccatctggctctctcttcatagctacagcgtccacgtggattgccctctctccggattcaaattcccagtctatcctcgctccttgcacatcggctctctcaataaggtttattacagaatcaaaaatagacacaccgcatggcgtgtcatcaatcctgttttttatcggattcctgtaatatccaaaatccatttcttcaactcccggatacgctacatgttccggcagcccagcccatgcttctaggctttccaacgggattttacggtcaaatccatatctggtatatgaactgtatgcttcgttcgtgatctcaaggaatccattcttaatactgtgccgctccaatcgtacatagtactttgagtcgtcaatatcccggaagtccagaaagacgatatcgttcggcttctcatcatttccgaagcttacagggataaacttgtctgctgttacaaactccgcttgtccatttccaagcggttttaaacaaaaagatccaagccctagaccgtcttgtaggttctcgttaaggctctctgtggttttctcaaacagtttcaagagcttatcattcgatatttttatttccatttccgacagcacaacatctgcaaactctctacatatcccctgttcaatcctcagggacttcacataatccttgcaccagtctgcattcccagagagcatactgttccattcatttattttttgcaccatcgtgcttgtaattgcaggagattctctcaacacctgcttcatcgttgtcctgcttatcatgttaaacactcctgtaataaccttgttaataaacttaaacatcttgcacctcactctgtcagcatcttaatatcacgttctatcgtgtactcaaatgcatccagtgtatcaatatcactactaccgtcatccagtcggtcatccttcatcgctttttcatcccacacagcctcttgcaatccggttgataatgtttcgcaatcatttgtaataaaaaagcgcccagctcccatgagctttaagacgcattctattctgtcatttattctgattttcttggccggtcttacaatcgtggccgtatgggctttgttcatagcgtttcggatactctggccgagcgtagtctctgcattgtcccaatagataaaatctacttttccatacttatcttgcacctcgtccacgaatttgataagcagatcattcagtatgttggagtcaatcccgtctttaaaatccttgttcatgtgccggacgctcttcaatccgtacacgttgttgtctcggtcatatcctctcgctacaaacgaatgaccagacttattgccgccaaagtccacaccaataacaatttctgtcaaatctgatgcagccggctcttttataaattcttctggatgatctgcgaattttcggtaaatcgctccctctgctctcttccagagcccgagaattaatctgtcgtagtaaactgtgccctcgtattctttgcagagctgctttacaaattctggatcaagaaatggattgtcaaaaatcgtgtatttctgcaagtatatgtccagttctttgttgtcgataaattcctttaaccagtgtgtaggattctctgggttgcaagctccatcaaagcaggaatatgtcttatcaagacgggatttcagcatctggaagacttctttgttccactttacaatctcatccccgtaacaatacttgatggacgctccctgtatctttgcgacttgactgaccttttccgcgccgagacaatagacatcctcgccgcatactctggcaacattccgattgttaatgttcccgatcagatcactggtatagatttccctcatcggttggagtacgtttctctcgatagattctttagagactcccatgattacatttaatcctgggagtccagctctatctcggattcttttcggaacaatataagcagtatctacaaaagactttccggaacgtaccgcaccggatttaatattccatctgtgcgtagcgttaattatgtactcattctgtttcttgcttagctgcattgtcacgcaatcctttcaaaatttcatccagcttctcaatcgctgtcctatcttcatattcctgcttatctctccatttgtctggcttgcggttcttgagccagaatatctgtgctgtcgtgtccggcgctacttgctttgtgacctttttcgtagttttcatttcatcaagttccggtatgtattctctggtagtctccgtgtactcatatccaagcgcacgttttagcaaagcattctcgacttgacgatcaacgacctcttttcctctttttagggtgtccgaaatgtccgaatacttgtctttccagctatttaatgtgcttctggaaatcccgatattatctgcaatctgctcgtccgtcagaccatctctcgcccatccctctatcttcagcaagccttccggctctagccactcttgatatttaccttttgccatccgactcaccacctttgtaacataataaaagcacccatctctggatgctaagaatttaggactactgctgaaagaattaataacgccaacaaaaacaaaaataaccaaatacacaatcaaaatttataagaaaaaggaggaaccttgcagtagtccacaacgggtataacaggattcgaacctgcgacacgtcggttaaaagccgatcactctaccaactgagctatacacccgtaggatgccttttattgacaccctttaccctatccgcactcgggtacgctgattacactaaatacagattgctgaatctatttttgtttgttttgcagatctgcggatatctgcgttttggtaccatttgcaatgtaagtccggtgtgcactcccacagcaacccccagctggtaagccgcaaaccttacatcacaaaaccgtgtgcagggatcgaacctgcttgtcccaactgaccacggcataaaaacaccgccagacgagaaagggcagaagtccggcggtgttccgaatgttgtttggaaagcttttggagtctttcttctaactccatgttatactatatattatttaaagcggacaatgtggacaaaacggacaaacttctatttttctttcatccacctctgaaattctttccttgcgctttctcctgtgcaattccctttcatcttcgcagccacttcatcccatgtcagtccttgcatcaccttgaaccggataatccgctgcatccttaccggagctttattgattactcgctctgcttttactttaatccgctttgcgttcagctttcgttcttccaacaaccgttcctcttcgtctatattcaccgtgttctctacacatccagagatattaaagctctgtggttggtacggaaactctggattgctgcctgtcactttatcctgcacaaacgtctttcttctgtgccgtctgatatcttcctctgtctctttcacaagtgctttcgcatccatgtactcatagattatattcttatccacctcaatcacctcccggaattggctttttgatgttgtacttgcttgctatgtatcctatagtgtccgtatttgttctgtcagcccttttaaaatcacaggcaaaggctttatgcccctgttgctttaaagcggtctcacagggctttctcgttgccatagtgtatgcttctattttcttcattccgttacctcaatttcctctcctgtcagctcttcaagcttttgtcgcatttcttccacggtcattttcttcggctcggtgcgttcccagatgagttcgagattatcatcgtctaatatcctctctaaaattgctctttggcgaatcttgaataccttcatgatagtcaatccaggatatccgtcttccaagttttcgttgtatgtgcttaactcataatgagctttcttcccgatcaaatatttatcaattactaatcttctatctccatctctgtattccactaccattccgtcttttaaatccgctttcgcaaattctttctgcatgtaatcactccattccaagattttataattgtacttttctgcaaaatcacgagacgaatattctccgtttccgtaataacacgtttcttcgtggtgcgcattatactttgtatttttccaataactttctccgttacaccacttcattccatgttcgtgcatctgcttgcagaaatcttttgcttcttcttcggtcttgcaattcaccgcaatcttattgtctttatttttaaattcatcccagttaaattttctcatatttcctacctcactatcttccgcacaatccaatctaaaaaaatcacaaacaacagtatcgggaagcatgccgctgctaaataatcctcacactccaactccacatcttcttccaatcctgtctttaaagtaatcacggttcctagccccaggatgtaatacagggctaggaatgcgattgtaattaaaatgtccatgttattcctccttgtatggttctggtagtggcattttattgcaattgctttgtttatttttatattgttcactcatagtaatccaggtgcaattttcaggacagtaatctccattcacgtctattctttcgattgtcaaatcttcactatatccatttttcaaagcccactcaaaaaaattttgtttatttttcaaccactcatcacatacttttattcctcttccgccataagcattgtaatggtctgactttgtataatagcatcgtccacacattcctttataaatcctataaagtcttgtaccagtcatgccgtgtgttatatttgattcagacatctttgatagtgtctgttggttcaaacatccacaagaatgtcttgtctttcttttcaaaacgtcagttgttctgtaaacatgattaccgcaatcacattcacattcccattttgcatatctgtttttagaaataccaacttgttttatcgctttaagcatatcgaacttcatgcctgttagatcttttacttttcccatcgttattcctttctcataggttctggtagtggctgccatgctacaaccttttcataccccaattcatcatttgttttaaacaccgtatcaacgaatcctaaacttgtcgaatcgtaaatatcatgccaaaatccaaatccatattcactatcatactggcagaacatcggcaaatcctcttcgtgattttcgacaatacacatatagaatctcatatcatcatcttctggcaatctatcttctactgaaatccagtctttatctttcttcccgtcttcatatccgatctgatacaacttttttctgctgcattctccgcacttcggaacatcgtccatgtgagaacggatgatttttcttgcaatataccatgcagtaaaactatctatcgcaaaatgatgaatgcctgctgaatcttctatgtcgtctatgttttcgtcaaatgcttcttttatctcttccaagatcttctctagtacgttctccattattccactctcctaaaatcctatatcatctaagaaaaaaccaatttcttcttcaaattcttctttttcaataccataatcttcaagcatttcttctaatggaaatacttcagacagttttttcattaagtattctgctattccctctgtatcatattcttcgacaatagtatctttctgtaaaggttgaatcattccatcttttaaatgatgtgcaaattcgtcagctccaataattattttattcccttttggaataattactttttctccaaacatcttctctacttctatatcacaatttgatgttaggatttgacctattttgtatttcatttattccatctcctattccatgcttcgattgcatttattttgcaagtattaatactatttagtgcgttgtctgcattttgcatactaggacaatatccttctgcttttgcataacattttttgcattcacaccaaatagtccaaccaacattattttttctttccatttttattcttgcttctccaccacaaaacgggcatttctttaattcttccatgttactcactccaatctaatctctggccacaatgattgcagcaatcagaatcccaataacaaaacatttctatatctgccatatttccaaacagtcttttgcatctaggacacgacgcttgtccattccagttttctacttttttcggcaactgcttttccagtgctttgattgctgtgcaataaacttcaatatcactttccaaataactgttatcttgtttctggaaaaatgctttattgtgccttatcatttctcttttcgcattaatcccaacttgaagccttcctattgcttctctaactttcttctcatccatctaattttcctcccgttatttccaaccataaaccactctctccatctttttcgtagagaaaatctgtctctatcccgcagaccgccaattcggtcattgtcctcacgcaatcctctgcatcagcgcatttgatcgtgtcgccttttcgcaagcgcgtttcttctgtttttggcattagtcattcctccgtatcgtcatctcgattccgatctcatcttttatcatcctcgtatattcatcccacgttgccatatcgtccaccaggcactctgctttcaggttcattcggtcgataaacctcttgcaccgtttcccggcaaaaccgaactcatcatgcagcgttgcgactgcgatcaccatcattgtgtccagtgtcatgctcttaatcttctcacaggcaatattcaactcttttctagtcaatgctgtgttgattcccgtgatatttctgaactggatttctttttccagtccttcaatgccgtctttctttacaatctctcttgccagaatcaatccctgtgatctaccagctgtataatcatcaacttttcccattttttctccttaactgcttgcaaagaccttcccactcaacctctttgttccgcgtccatcttttcgctgctcttcttttccggatcccgttttcatccatgtaccggataagagtttctgtcgggaattccgctttctggatatcatgtaagactttatggatatgctcatccgagcatccgagtttcgccatctcttcaatctggaatcggtacttatccaaaaaatgtgctgctctactcattttcctctcaccctcttctttctcttgcgcttggtgctgccgtacataaacgctgccatattgcccggtttgaatcctgcagactgttttctatggctgctaaagctgtattttcctctgtccatgcttactccctttctaaactccaccatgcttttgtgttctttccgtaccctgtagtctggattcttactccaagttctgctttcgctttcataacatctgaccgtttgattcccgctgcatctgactccatgagcagtttcgctccgtcatatcgtccgcctgccattttatcttttaaccattccaccgccttatcataatcggtctttgacatcgtattgaccttgtccttgattctttccagttggacggtgttggtgttcatcttgttccagatcttttcaaaattctcctgcatgattcttcggttttctaaaatctcatcccggatgactgtaagtgcctgcgctgcggtcatacctttcttttccggctcttttaccagacttcccggttcaagtccgagaagtaaacacatggttctttcaaaatcttctgtctgttccgggttcttcgtcatattgcagacaaaagacttgcttctcccgagttctgccgagaatttctctttcgtcttgccctgcttttctagttccttacagagcagagcgtaatttattgttactttctttggttccataattcctcctaactaaagcttgcttccggctcttcctctggacatatttctccatctgcttccatttcgtttatgatgattttcgttcccgatctttgtaatctcagcaacagcatgtcaaattccccaaggtatctcaacgacttaatgtctacacatcccaaactgtcaagtgtatactctttctcaaaatcccatttcgatatcggaatttccatattcaactcttcatcgtgttcgttttcgaaaatgattaccgccctatgcagggagctccaagtagatctttcacgctcttctattatcatctcgcaactgaccgattcgtagtatggtccatcgccaaactccacttccagaccagttgtactgatcttcttttcgcacattgcaatccatgcatcaaacagatcagtgactttcatttctttttcttcctgcttgattgataattccttaaaattttccagaatctttttattctcgatacaagcatcggaatttacgatttctgtaagcaccgtatccaactttggaaggtattccgaaaaatcatacttctctatgtacggcaccataacttcgtctatttttttcttcagtgcactttctacttttccccatctaaacgctgattctattgccgattctatcgattccttaaatttctttttgagtatttcctttacttcttcctcggagagacactcctgtgccatttttaataattcttctttcattttcttcctccttaattcgagttcagtagttgttcttccagagagtccatgtcgtatcctctgcgctcaaagttgtttaagtttctgcttaccggcggttttgattgcttctctgttcttcccggctcattatcaaaatttcctcctagaatcttttttaaattctcttctttgataatccagttaaaattcgccttgaatttataagcccctttgcattcttcgcctttcaggaatttactgttctctgcttttgcaaatgcggttctgatctgttcaaaaccaaatttcttacaggctgcatcaatatcttccttcctgctatcggaaatccgctcaactctatcaaaactcttacagatatcattaaatgtgtcggcgatcagctgatagcttattttgctatcagtcttatctcttactctatctctattatctaactctatatctatatctatatctgtgttacacttctgtacattgttgttacactccgttacattcgtgttacattgtaacgccttattttttcttgatgccctgacacgctccgctgattccgattccgagcagattaaagactgcgtttccgtcattaaaaattctgtttcggaacagggctcaataagtccttgagatagcaagtattgtacagttacttttacattgtctggatcctcatctattgtcagagcaatttcttctgaaaaactctcttcaatcccatcaaaaaacagctttccaccattgcttaaactcagcagttgcatttttaaatagataatggtataagtatcgccgccagcaattttccgtaactttttaattttgggctgtgtaaaaaaatctttctgtagcttaagccagtagtatcgttttgacattaaatcacagcctttctgtatctatctgcattccagattggtattcgcggtatatttgcatccaatcatccagctccatcgtaacaaggattttatgattgtttttctgtaactattcagaaccagctttactcaaagatgaaatcagggtgacctgtgatcgcatttttgattgcttcgtaagcattgtatccctgtttatgtgccgtgcctacgtaggacatgatttttagataatctctggcaccttcctctgttcggaagcatccggatactttggtcttgacctttatcatccgaagatcacgttctgcctggttgttatcaaacgggacattgaagttatggataaaaaggcagactgaggccttgtaattcgtaaggcgttctacaagggcaaggatttttccttttttcttccgaccacgttttttctccgtggtttcgggaagtggattttccttccgaacctgttcgataagttcatcatactttttatcgaacttatgatagtgataatagctcagaaagtccttacctttctctacagctttgtctttgacctttttcatttccagtaaaaggtctataaatgcagatgcccacttctgctcaggatgattttcatcaatccccgttaattcacggagaagatgggcacagcagactgcatgctgaatatccggataattccagtaggaagcccagcagtcatgcatggcaatccctttgaattccgggagaacaccgcattgttccatgcctgcatttccacgtttgggactgatatcaagataggtgtactcacagtttgaggcatcatgaacccaccagagttttttatccactctggttcctgtttcatcgaaatgtccaagtgcggaaccgatcattttatccttgatcttacctactgtttcactcagactgtcagcgcatctttttaccatgctgctgatcgttcctgttgcaattggaatgttaaatactccggaaagaatctcatgggtgcgtttgatgctgactgcacctacggtatttaacgcaacagctaatgactgaaggttttcgccatactgtacggctgcttttacgtcagaagggaaagcacctctgcgtgtatctccatgcagcatacagattggaagttccagtgcctgatgctccgttacattgactgtaacaaccgcatcgataacatggcgtttctccgcaatgcatgcagtgcccttgcatatctgataatgtgggcatccttcacatgcggaaggcatatgtttgactattttatccggagctgttattaccgccaaatgtgttccctgatgtccgttctgtccaccaacctttttgccagatggttttcgcagactctttggggcaggctttttgaaaccatcacttgaaggtggtttggaactgtttttggagttcttattaagctgttcctttagttcctgtatcgtctgattgagttgagcgatcaactgtgtttgcgcattgatcgtagcattcagggaatctacagttgatgttagtgaattaacctgctgtaataactgcttattcatttcatcttttgtcaatcagaccaccttcttccgttaaaatttgatacttctattttaacggaaaatggggtaaaaagcgaatcgtaagatttttgcatactgtcaaaatgacggtggataaccagaaaaaatcagagattaaatgctgataacacctggataaaatccacaaaaatgctgttatctgggtaaaaccaaggagttatgtttcagtaatccacaaacccaaagtacttggcagctaaactgaaaaattatccacattttacactaaaacgatgacgaaacagaaattttattttctctgttttgccgaaaaatcaagatgtacttaacggggtactgaatagttacgtttttcttatggaatacagcaggaagctttcccgttctattcgccgcggcatctctcttcgcttgatccatccagtcataaagtcgcatctgctcttgatgtttcgcttccacatgaattaaaggaagaccaaccacgtctgaagcatcgcctgtatttccgcagtattgcgctgttctgcgcgcttcttgatatccataatcacggaagataccagctaattcccgttcaaatcttgcacctttctttttactatttactgccattccatttcctttctttgtagtgcaggcaaggctcatccttttccttgcctttgcactcccaaaatctctcgcaatgtatgcattctcttgttttcttcatgtgatcgccctacatgaacggaagttcttcatcaactccatcagggacgttttggaatccatcgggatccggctgtccatattgcggagcagactgtccgctgcttccattgctttcgcagaactcaaaactattcacgatcaactgcatcccgtaatgcctcacgccatctctttcatagttgttgtttctcatttctccttcgatcagcaactttgttcctttccccacattgcattttttaaatgtttccgcaatctttccgaatgctacacactggaaaaagtcagcttctggatctccgtccctcttaaatctgcggtttacggcaaaattaaaacttgctactgctttcccgtcatttgtgtatctcatttctatatctgccgtcagtcgtccgcataaaataattttattcatatcaattcacctcttaatttccaaacaacgccgctgctgcactctgtcctctttcggaagattcagttttttcttcctgcgactgttccatgtcaataatctccgcatcgctatcgttatcgacgtatgtttttgttccgtcatcgtttatcactgccatatctgcatccattgccgacatcatatcgatagacatgattccccatttagagattagctgacgcagcatagttttatatgccattccgtcaaagtccttttcccagaacgtgtatccctttttcgcctgatatcctttggaatactttaatgcatgggcttccattttctttttgctccaatagatcgcctttttaaacccattagtatactcaaacattgcataatatccgattgtttcagcctgttctcttgcttcttcatcctcgatcagatgtacctcaatctcttcgttcagaggatcaaacctgacaagctcgccctctttaatcgccagtacgttcagttttttgtactgcccggaacgaattgcgagctggatataccctttatatccaagctgaaactgcgccaccttacctttgtttctgtcattaaacggaacaaggtaatactgtcccaactgcggagacggtgaaaggttcagcgactcacccagcagcgcaccggaaaggatcgattgatttgtgcattcctgtaatgctgcattgttatttacagccgatacaattgcagaaataaatctctgaccgttcttcccaccgattacgttgttgatctggtttttaactgcttcctgtgttaaatatgctgcgattcctgtgttttttcttgctgttaagctatttcctactgccattttcttttcctctctttcttaaattgctttgaattcaatgtttctgctattgaaaaatgcttttaatgccaaagcgtcctctgttgttaaatttgcctgaaatgatacccactggcgctccctagctacgcactcctcaaatacttccttttcaatccctgtcacgcactttgccatctctgtttccggtggattcatgcattcttcaaaagattttgcgtctgtaaatccaatctgtccaggaagatcctcttctttcttctggaactctgctgcctttttcgcttccttctctgctttcaatttttcctgttctgcttcgtattctgcttttttcctctgtatttctgctaggcgctgcccttcatttaacgccctgttgatatccagagtggatttatagacttctaatgcttcaaagccaaattccggtaattttgaaagtgtatccacatctttctccacgcttgtgataaatgcattcataacatcttcgatggacctcatggatgttgttttgtttaaccatctactgtcaaaaatacgctccaaagaaatttcaaacggtgtcgatttactgttccagagttcctcgatttgcttccgtttttcctgcttctcgtactcttcaaattccttaatttgcttatcaataaggttaataggatcgttaataagcttaatcaaggcgttaatttgagtcttaaattcgttaaatggctctaaataagccttttccagtcttattctttcgtcatttaaggctttttttagcttatttaagcttgctttatctgatttagcatccttaatttgctctccggtgtacactaaattactgtggtcttctactattttctgtatttctgaccttaattcttcataattaaatgtaattttctccggcattttcacttcattgactcttaattccatgtttttctctcctttatcttcttattacatccggaaggataagcggcgggcattcatctcgctccacgtatccccagaatcgttttccttctttcatcaggtattccatgtcttctttcacatctttccgttcaaaatggtaatgttttgtttgaacgaatacctcaccagcatattcactttttagctgcgcttttaactcgcaaaaatcagcctcaagaactgccatatacagcaagcactggcaataataatgatccgggatctggtggtcccatctctttctcatatttccgtttaaaatgttcgttgtcttgcattcccagattccgagtctcccatctccatcaaaaagccaaccatctactgaagcctgcgcccagggatatttatcatttcgaaaactgttgttttcctcatatctcacttggtattctggaaagtccagccggaagagttctcttaataatggctctgcctgtgtaccatatttaatataaggaagatttgaaatgtctttcgcttcttttctccctgtttttaactcccacaactctacatttgtcatgtatggattcttcccgattacagcggcaatttcagaaccgccgattccattttttctatttttaagccattcttcatggttgctaagtattgtttttgtaatcatttgacttttcctcaaattttatctatactttaactggtttaatttcttgagtgctcgagggttgccgccctatgacagcgctcatttttaatacccaaacaccagataccacgacagtagcaccagtccaaacccgatcacagatgctgcaaccttatgccagtaaggcttgtccttttcttctggcagatctacggagactgaccggatatcccagctatttaatgtgttggtgtgttgagtagtctggcagtggtaggttcctttaatttccatgcttgtcctcctttaatttcacggattttctacctcggatttccaactccattctgtaattctccagacaggcgattgcatgaagtttctgctgttcggaataaccattcactctttctgttgattccagcgcctggatgaatttctcaatctgattgattgtcagccttttcacagcttgtcctccattctaccgcctaagcggttttctcttccgtgtaatttcttgctgtcagagctttccggtttaatttttctgcaaataattcagcgtccggcaagtctttaacttccacttcttttccgttgattactacaatgttctttatagtcattcacaccacctctctaatatgtatgacggatggtttgtccgagatatgttgtccatccagccttatttctggtctgttccaaatctatcagccatcatttttacaacaccctcgacaagcttaatactcatgttaaacatcctatctacctcgttttgagtaacgctcatgtattcccttgtaataataatgcttgtaacaacagaaaccatgatcgagcagataatgcttgctattacaatctccatgtcagtcctccaattctataaccagcgtgtcaataagggttcttattgttttcacaggtttttccaaaaattttgggtcttctccggaaatgcttccaggttcatatatatttactgccgtacccatttctttttgatatacaactttcacgagtacatcgtcggcaattaaatttgccaagtctgacaatctcaatccagacagtttttcagctttaatactgccggctacaatacttggtgtcttagtgatgccgtcaaaaacctggacatccatatttactgtaagatcagcgacaacatcttcatatttctgttctaatttgtatgatttcacgcagttaagtttcttgccgtctaaaaataatccattgtcgatttttacgttgctaaacattgtctttttcctccttatttaaattctgactgaagtacttctatcttcggaatcagttcttccagagatcgacttatcttctgatcatttttctgcgaatccatgtagtaatcatgaatagttgaatactgtcttgacatattcacaactgaaaatgaagaaaaaataacaaagacaacaagtgttataagcagacagagtgtcttgtgttttaggctatctacttctgttttaagtccttctacttctttttttaacgcatcaaactcaattcgatccattctctgcgattgagcattgtacatctttcctgtacgtttttccgcttcttgaacgaaatccattcccggtgtccccggactgccactccaacacattctatttttcatcctttcttacgcgacatcagaatccctgactattacgtgatacttccttgcttgtccatcgcactgcgtatatgagatttctctcggatatccattgtctgcgtaccattgctttaccatactgattacttccggcgcatactttcttacagtcccttgccatttccctttagattcccatgtttccgtgtacatatcttctgataaatccaatctgcgaataatctcatttacagctttatctgccggtttgccggaactctgaaagtaaagtcttgcctgtcttgcaatgtgtaccgtatctacatactgctgatccgcttcaatcgtgattggaagatttactcctgctttctcataaagtgattttgcggtcagaagctgaatcttgctgttgcatcctgccgctttaagcatcggcgttaaaatcttcactgcattgttcacgctggcgagacgttcgttacgctgctttgtttttggcatttcgtaagagccggtttttctaagcgccgggagcacttcggatgtcacccaatgcttgaatctttttgctgattccaacttgctgccgaagatgagagcgtaaagaccggattctgaaataatcggtgttttctgcatccttccgatggaatcctgaatcgggacttcatctttatcctccgaatcaacatgatcctgaatggctttcgttgctctttcatatccgagtgatgatgctacatccttcccgacgaaccacggttcattatcaatagttactgttcggattttgccaaactctttgttgttaaaaatttttaattcgttcatttgatctcctttctgtttttaacatttcattttcgcatttcatgcgacaaattgactaaaaaaaatgctattcacttcgttcctgttcagatttaactctttagaaataacatcagcttcacctatcgtaaatgtttgaccatccgccgataactttctgtagaatgtagacctgtcgattccgatctttttcgacatactttcagcatttatgccgatctcgaccattttcgctctgagtttgtttacatttaccactccatcatctcctttctttttcgcatttcatgcgactaattgtatattacaatgccttgtcttaaaagtcaatactgtttttgcattttatgcgattttttttgtttttcgaataaaagtgttgcgtatttgcgaataatatattataatacgtatataaggtggtgaacaaaatgacgataggacaaagaattaaaaacagaagactctacttaggtttaagcgttgatgaagttgctttaaaacttggaaaaaatcgcgcaacgatatatagatatgaaaaagatgatatcaaagatttgccaattacagtactcgagccgttagccaacgtactagaaaccactcctgctgatttgatgggatgggatggttctagcgataaaggcatcgaaaacgtatttgtaaacgatagtattgaaaatataattgataacatcagtgcattttcttcaacggaaaagaatcatttcaaaaaatatctaaaattagttgaagtaaacagaaaaaaggcagacaattatatcgaacagctgttatccattcagcaaatggataatgatttgtcagtaatggcagctcatgagcgtacagatattaaagtaacaaatgaaatgagaaaacatgatgatgacatcatgatggatgactctgaatgggagtgatggacgaatattcagaaatagaattgcaatatctgataggttaagaacatcaacagaaaaagcgtgtgtactcgcagaagaaatgggacatcatttcactgctgttggaaatatcattgaccaaatgaatattgaaaatctaaagcaagaacaaaaaggtcgattacgcggatataaccgaatgatagggttacgtggtatcatatccgcttttaatgctggatgccagaatcgatatgaagttgcagaacatctacatgtcacagaagaatatctgcaggaagctattgactgctatactggaaaatatggtgaatgtactactgtagataattatgttatttattttattcctaatttagcagttatggatatgatataaccgcttcggcgtttatatagagtaaagtggtgttgaggtacaggagaaaagaggaaaatatgaaaaagaaaattgtagcaatgttattagtaggagctatggcattatccattacagcatgtggtggggatgccgaaccatccagagacgccgagacaacgacagaagcaacaacagagcagaaagaagagccaaaagaagaagctcagccagtggatgacggaatcatagattttacagcagaaaaatttaatgtaaaatatgtacgacatgaatttgcgaatgattatgagggaaataaatgtctgctttactattatacctttacaaataattcggacgaaaacgcaacagctggaattgctgcaaacgtacagtgttttcaggacggtggcgagtgtgaaatgggaattatggcagaacagaacgactctatgaacaattacgctataaatgaagtgcagccgggtggaacggttgaagtatgccaggtatataaattgaagagtgatactgagctcacaatcgaagcatccgatatgatatcgtttgacaacaagaaggatactcagaaaatcgccgtgcaataaaataaaaaaccgccccagtgctaccaacaccgggacggcaatacatatccgaagatatgcgattaaaatccaagaatattgtatcatcttcggagcagtcacgcaagcggaacgtttgttttgcgctggctgttatttttatacttaattttaaaggagatgattgtatggccaaaagaaaaaagcatcctcgtttgcccaatggttacggtcagatacgctttctcggcaaagggcgccgcaatccttacggcgtttacccgccagctaaagaagaatacgaaaacgggcaaatgaagccacagaaagcaatatgctatgtttctgactggatgatcggctttgcagttcttacagcatacaaagccggcacctatactcccggcatggaaaatgatatccaggtggatgacaaaaagaatgcggaggattttatccagtctctgcttgcaaattataatcaggtacaaggaattaaagcaaaggaagagccgcaattaacatttgcggaagtatttcgtaaattcaatgttaagaaattcgggcatgaatacgatgcaaaaaaagtaaaacgtaccagcttggaatatacgctacgcgcaggattcaagaactctgctgccctacacaacagaattttcgcagagcttgttacagacgatctacaggaagtaatggacgcttgtccactcagacacgccagcatagaacacatccaaaatctatactatcacatgtataagtatgctatggcaaacaatttatgtacaaaagattattcgtcttatgtcgaaatcacacaggatgacgatgacgagcatggcattccatttactgatgaagatttgaagaaattgtgggaaacaaaagaaaatgaagtgtccgagatgattctgatcatgtgctactccggctttcgaatctctgaatataagactttagaagtccatttgaaagaacgttattttttgggtggtatcaaaacggatgctgggaaaaacagaaccgttccgatttattccgggattttaaatcttgtaaagcacaggataaaagtacagggttatatcctgcctgatagaatcgatatattccgggataagatgtatgcgcaactgtccgcacttggaattgaaaagcatactccacatgattgcaggcacacattttcgaaattatgtgaaaaatataaagtcatggagaatgatcgaaaaagaatgctgggacataagataggtgatattacaaatgacacctatggtcaccgaacactggaagatttaagaaatgagattgaaaagatagaaatcgatttgttgtaagtgtgttgtaaacggttagcttattctacttgaaatcaattcttttccgattgcattttatagacgaaaaagcccgtggttgacacgttttttgaagtctttgcgtcaaccgtgagaatctttgaaaatcaataaatcttaagattgcttaagaaaaatagtattttttttaaattcgctataatgtacacagatcaaacaacttaaaaatggaaaagaaagggacgacaaatatggaacaggctgatattttaattgtgaacgataacctcgaaatccagaaaattatacagattttactgacgggagaaggttttcgggtgacagaggcagaggatggagaacaggcgcttcagaatttgaaaaaggttggattcgacctgatcattctggatattatgatgcccggtatggatggatatcatacctgttcagtgcaaaaacaaaggacagcgataaaacacttggattttccagcggcggggacgattatcttgcgaagccattttcctacagtgaattgatcagcagggtgaaagcactgatccgccggtatcaggtatatcggggaaaagaatctgatcaaattgtaccggaaaaaggaacagccagtctgcagtatcatgatttacagattgaggaatcaaagcgggaagtgacatcaggcgggaaactcctggagctgacagacatcgagtatgaaatgctacatcttctggtaaagcatagagggcagatattttctgcggaaaggggtatcgatgtgactaaagtaaagagtctggtcacacggataagacaaaatatggcggcacagctattattacttattttgatcactggaacatgttgtattttgttcttttgtgtagcatggcagaaccgtcttccgatcctctattatttcacctatcaggttcgggtgttttcggcgatggattctgatttttcagaccggctgactgaggaaaccaaacactataatgtgccggaaacgatggatgatagtggcagtggaagcaatccagcccttcttttctatttgtgattcgtacacaagtgtttttatctatggtatggatgggctctatcgtgccgggaaaatggcagatatcatgaacaatccctccttccgtactttttttgaaggaggaatcgcacatttgagagatgagatcatgatcacggcatccggagacttaagtcatccgattctggatcttggaattgatgaaatcggagttcttggaaaagaactggatgctctgcgtacaccgctgacgattttgaacggatatctggaagtgctgaagctgggaggcagccggaacattcggaaattgaaagtaatcagattgcttaaagagtgtgagaaaaatgacagaagaaattggtgcagccatgactgtgaaagaggacattcaatattttacggtggaaatcgtgttttccgagaaagaataaaacacatcccggactgtatttcatccgggatgtgctgaaaaaccagagatttaacgaataaagtttgtccttaccttctcttcggcttccggttttgaaattccggcattttttccggcttccagacagtgaagaagccatgccatgttcttgccgaggatgtgcatgatctggagtccttctttgtcctgctggacttcgtccggtgtgttgccatgaaccatattccagtagttggaagaaacaataggcatctggtggaacgaaaaatattttaagagaacatccagtgttgctgttgtgccggcacgtctggcggaggcaatggcggcagcaggtttcatcagcatatcttttcctgcaaaggaacagaacttatccataaattcaatgatctgtccggttggagatgcccagtataccggagaaccgacaatcagagcatctgcctctgtcattttcttagcagcagctcttacgttttcaatatccgcatttcctgcctgaaaaatctcactttcgatgccgttttcctttaaagtctctgcaatctggcaaagtgcggtatacgtacatccttctttccgcgggcttccatttaacatcaaaactttcattttcaattccttctttcttttgaacttataatcatattatagcgcatctgttccatttagaacagttccaataaccagaatgttttgttcctgacgcacatcggcattgtaacgtctcctctctcatgcaataaattttagcaaagcttcattacggatttctggagatttgactaatattttcttaagatttatcatatttgattgtagctggttatctgctcatggctgatactccggatgcaaccacaccaccatcacaaataatgtcaagcccagtcagatatccatttctttcatctacaatagtagaaaacagatatgcgatctctcttggttttccgaatcgtttgattgcggcgctgactgttttgaataccagattacaaaatctttagatattccataagccacacctgttcggactgatttcgggaaaatttgaagccgtttattcattttcttacgaaatagttctacttcttccagtgcatatttataaagttttcttggcatcacaatggatggagtcaggtatgcggacatggaagaaacatcgagaatgcagccaccttttcccattacctttgcaaattctgtgtttatatagattgttccgagagcattggtcttcaaaatatcttctgcttctcccatatgtgggctcattcctgccgcatgaatcaccgcctgtacttcgcccagctcgtgagcatgattggcaagttttctgactgagtacaaatctcccacattgcaggaaaacgcttcacactccacgcctttctcttgaagagtttttatagcatgctgtagttttcctgctgttctgccgcagataatgatatagtgagtttttcccatgatcatcgcagtttcaagtcccataccgcttccgccacctgtaataacacaaattctcttattcatttcattttcatccccttttagttctgaataaatccttccgctatcagccattgtgcttcatcccggagtgtttcttcatatggtctggtgtggtattccagttcccgttctgccttagtgtagtcaaactgattgtttcttgccagattatatactgcaaaatttgttatcattggtttttctccggttttcctggcttttttctccatccggttggcaagcttgtatgccatattgattggaacgtagaaatacggagtcttacagccgctagtcttatgaagtatccggcacatttctttgagtgtaacctctttatttccaagaatgtagcattcgccaatcctgcccttgtccgcagcttttacacatccatgtgccagatcacgtacatcgcagagattaaaagagccgcccatgcctatcggcatttttccattcatgatcttgattacggttcctgttgtctcgctgactgcataatcttttgggccaagaattccgcttggatgtaccacgcaagcttttaagccgcattctctacaggcatctaaaaccatctgtgtagcaagagctttagactgactgtagcatcccacctgtctgcttttatcaatcggagtgaactggttcgtttctcgaattacggttccctttggctgttccggaattgctcctgtagaacttacataaaccatttttttacattcggaatgttttaaacagatatcgatcacatttttggtacctcctacattgacatctatcagcttttgattaaagtccgcgttcatcgttacgatactggcacagtgaatcacaacagattcctgaccttttggaattgtaaagaatctttccagagaatctgcattgcagagatcaccttctgtaatttctacctcttccgggatatattttacggatttgtctcccggcaataccagcgcccgaacatgatcgcctcgtttcaaaagttcatcgcatatatgactccctaaaaatcctgctgctccggttactaaatacactgttttttccatcaaaaaaaacctcgctttctcatcttgttttcatctgatggatataataagtgaaaattgttgttcttttatttaaagaatgtttctgttttattaatttcgattcatttttcaattttgcaccaatgaagtacttccggtataatcttcgtacacattgctgtttactatggtatagagaacatttttgcacgcagtccgcattgcctgtacagaggtggcacttttcgtatctgtcatgatcgcttcgcttccgatcgttgccagcataatatcactgcctccgcacactgcacggtccgcatccatgtatccatagtttccgaagtaatccgtaagtaccattccgcgcaatccccactcatcacgaaggatctcattcagcagttcaggacagccgcctgcccattctgtccccacaaagacataggatgacatgatcgcgagcggacgtccttcggaatttttcacgcatgcttcaaatggtttcagatacagttctcttgcagactgctcgtttaaccatgtacagcagattgcattccggtttgtccctgttcattaaaagcaaaatgcttcagataaggataaatgttgctgtcaagtgctgcatttacttctgcttcttccatacgggcacttaaaatactgtcttctgaataatattcaaaatttcttccgccgaaagcacttctgtgaaggttcatggacggtccgtaccagccattgagtccgaagtcttgcagctcctggctgattccctgtgcaagtttataggcaagatcttcattccatgtctgtgccacaaggattcctgcacaatatccggttccgaagctgccggtcataaaggaatttacacccgcaggtccgtctgtatccagagtggcaagttttccgatcgaattgatagtgacagtctgaaatctgccccatccgatcaattctaccatttcatccaccgttatctgatcaagcagcttatcccactgtgggtcgtcataatccttgcctctcagatcatagaactccagaccacgttcccattttgatatcgccttatcggaaagaaacagtttttctgccagttccttctgtgtgtaacctttttcttttctcagcgctgctacgaattccccaaacttttgattgtcaatttcatacatgaagaacatcactccttattgttttgatgttttcagtataaagaatccctgaatttttggcaatcgactgtcggtagaatcgcatatttctgctgtttaaaacatactgtcccttaaaatatcatgatctctcagcagtttttcaatcacagttccttttacgatccgtaccaatggttttttcaatgcattgagtggtcccggcagttcaatctccagcggagatcttccgtccatcaatttaacggagctgtctaaaagttctcgtacatcatacacactgccccacacttccggaaccccgcggtctacaccgagcagtccataaacagcttccattgctgtgcggacagaatattctgtcgtaaatacggtatctctcggcgtatctgcaaactgtccgagaaatgcgaaattgatgcagccatccggaatgacatccggccggtctccttttgttctcggcataaagaatgctgtaatataaggcatcatcgtcggtacacaaagtgcactgttttttgcgagttccggaatctcatctgtcggcacgccgatgtgatacagccattctgccgtaatctcctctccggtacagtctttcatcggttttttgatataatctccaggaacatccgtgaaaagtccgtaaacccagacgcatactttttccggatcctgctgtttgaactgcccctgacggttgatcgtccagctcatcagccacttggagtctttacagcttacaattcctccggtcacaacgtttccactgcgtggatcccgtttgcagatatttgtaatataaggaataatcttatcatccagcgttgtgatcgtagcagattcccagttagtctttgaaatatcagaacagaacttctccggatgtccaaaggccggatcctgtctggcaatatttttccagagtgaccagcagccgcttgtacggacttctgcatctccgttcggtgcgtgatgatgatctccgtagacagttccttctgtacagcttccgtttgtcacaaataccagatctttctcagtcagaaggattcctttctccacaccattgactttgcattcaatggccgaagctaccttctttccgtcttttctctcaaatacgacgttcgttacttcggtatgaaactgaaaatcaatacctgctgcttccagatatttctgcataggaagaatcagagattcatattgattgtatcttgtgaatttcaaagcgctgaaatccggcagtcctgcaatatgatgaatgaatctctggaaatacagcttcatctccagtgcactgtgccagttttcaaaagcaaacatcgttctccagtaaagccagaatgtagagtcaaagacttcttcatcaaaaacatcctcgatcgtcttatcatacagatcttcatccggagtcaggaacagcttcatgatctccatgcagcccttctggcttaaattaaatttgccgtctgtatgggcatcttctccgcgattgacagttgcccggcaaagagagtaattcggatcgtgcttgttcaaccagtaaaactcatccaaaacggatgcattcggcacttccagcgacggaatactgcggaacagatcccacagacattcgaaatgattttccatctcacgtcctccgcgcatcacgtaacctctggtcggatcgaagataccgtcacatgcgcctcctgcaatatccattgcttccaggatatggatatgatctcccggcatctgtccgtctcttaccaggaagcaggcagctgcaagagaggcgagcccgcttcctacgatataagcactcttctcttccaccccctccggtttttccggtctggcaaatgcttcataatttccatttgaataatagatcccttttttatttttcacctgttttccgcgttctgtgttccggtaatcctgataccgggcatccatctgtgccttcttttgctttttctgagattttttcttcatatatgtggcagctcctgcacctgcagcgatcgcagcaattccaatcccaacgtgtttttttgccatagtaatgaccacctttccagaaatgtcgtccgattcagatcggatatctttgtttctgcccatatactatgatttttattcatgaaattcaatttacaaatcaggacgtttgataaaatttttatcacggatcggtttttgataaaaaattctggacggaattcgtaatactgccatgtagcgtcagcgccatattgtctacaatttcactgtagtcctccttcatgccctgtttgatccagtccagcatgattcccacaaaactatatttgtaaaaatttgcgataaattctttctgttcctcccgaatctgcattccggctgttttctcttccacaactgctttcagcagatcataggtcagatgaaacagataattttcaatctgttccctgctgacagaatggtatgcattgagaataaacggcttgttttccaaaactgcttcaaaaatctgcaggatgccttcctgccatgtatcataggtctttttcccctgcagcgctctttttgcatcctccagacaggaccattcaaccagatcgtaaatatctttaaagtgataataaaaagccatcctgctgattccgcaatccgatgtaatatcagaaatcgtaatcttgtccagaggtttttgaagcattactttctttaaagatgcttccagggcctgtttcgttgtgttggacatgaaatccctccttatcatgcgttccttccaatagcatacaggataaacatgaactttacgtgaatttttttcaattattttcccgaaaactctgtacagtcagattccggtatgctatactctacctcgcatttatcaaatcagaggtgcattttgccctctggactggttcgtgaacttcccagtataaaaaaccaagtatctcgtaaggtggtctttgccacggaataaaaaagtaaaggagattggagaatgaatgcaaaaaaagtcatcattgactgcgatcccgggatcgatgacgcactcgccctgatgctggcgctgcgatcaccggaacttgagattttagggatcacagttgtctctggaaatgtaccggcaaaaaaaggcgcgtcaaatgcgcaaaaagttctgcactggatgaaccgaccggacattcctgtttatcttggagaagaactgccgcttgtccgtccttatgtggatgctatggatacccacggggaagacggtctcggcgaatctcattaccccgaaatcacagatggaacaatcaatacggatggtgtgggctttcttgcccgtacactgcatgaagctgcccaaaaggaggagccggtttcgatcattgctctgggacctctgacaaacctggccagactggttcaaaatgatcctgaaagtcttgccggtcttggagaactgatcagtatgggcggcagctgccagagccatggaaactgctctccggtcgcagagtacaactactggtgcgatccgcatgccgcagaaattgtatatcgtgcatttgaagaactgcctgttttacaggacaaacagattcacatggtgggactggatgtgacaagaaaaatcgtcctgactcctgacattttagaatatatgtgttgtgtgaatccgcagatgggcgaacgtatccgaaatattacccggttctattttgattttcactggaaacaggaaggaatcatcggctgtgtcatcaatgatccgcttgcagtcgcttactttatcgaccgtactctctgcagcggaatggaagcctgtacgagaattgcaacggaaggtctgtgtatcggacagagcgttgtagacagatttgacttctggaaaggacataaaaacagctatattctgaccaggacatctccattgtcatttatgcagatgttttttgacagagttcttggtgtaccagacaaaacaagcctgcccatactggaacagatcatgaaaggagacgtattatgagaaaattttcaaccaataaactttgtatcctcgccctttgttcggtgatcaacctgatcggaggtcagatcgcactgctgcttcgccttccgatttatctggattcttttggaacggtgtttgcggccgctgtgatggggcctttttatggaatgattcccggaatcgtcagtaatctgatcggaggcgtgacaactgatatttacgcgctttattaccttccggtccagatgatcaccggatgtatggccggttttgttttccggaaaatgccgcctcatggcggaaaagatctgggaaaaatcctgtttggagccggaatgatcagtattccgggaacgctggtcagctcttcgattactgcaatcgtattcggtggaatcacctcgtccggatctacacttctggtgcagctgttccatcatcttggtctggggctgactgcaagtgtatgcatggttcagggattgaccgactatgcagacagagcgatcgttctggcactgacagccgtacttctggcactgcttccttcttccgttaaagcagcagtaaataagtaaggagaatattcatggaaagatacaataagattacaaataaaaatccgcgggaaatcgtgctgttaaaaggcagaccctgtgcctggggaaaatgccgtttctgtgattatattgaggataattcacgggatgttcaggaaatgaacgctctgaatcaggaagtcctctcccatgtcaccggagaactcggtgtattggaagtcatcaattcgggaagctgttttgagcttcccgaagagactctgaaaatgatcaaagaaattattgcggaaaagcagatccaccgtctgttttttgaatcccactggatgtaccggaaacatctgcagaaaatgcgggattatatgggaattcccattacttttaaaattggtgtggaaacatttgataaaaccttccgggaggagtatttaaataagcatgcagattttgactctccggaagaagtccgcaaatactttgattcaccctgcctgatggtcggcatcaaaggccagacaaaagaaatgatcgattatgatattcggatgttaaagacacattttgaattgggaactgtcaatgtgtttacgaacaacagcacggacgtcaaacgggatcaggaactggttgactggtttatgcaaaaatatgccgaccttctggaagatccgtctgtggaagtcctgtatgaaaaaaccgatttcggtgtgggggattgatttgcttttgttttcctgttactttgcattccactgcccgatcacttcattgacagttgaaacggttacaaacacgtccttttttgtggtgtgcagatagttgagaagcagccggtactcctgctgtgcaagaatcgtcacaagttctgtacggtgtttttcatcataggcgccctgggcgacatagagggtggcaccgcgtttcagatcatggatgatataattctgtatttccttataatcatcagaaatgatgcacacccgttttcgcttattaaatccatcaataaaataatccacagccataccgtttgcatacgttccaagcagactgacaatgagtgtcggtacgtcatacaccaggatagatgtcattgctgttacaaatccggacagcatgacagcttttccaagttccatgtgtgcaaatttattgagaatttttgccacaatatctaacccgccggaagaggcattgacatgaaacaacatggcctgtccaagcgctacgatcagagtatacgtaacaagatcaaatacctgattgcctgtaacggattctgtgaccggaatcaatcgttcaaagatccagagaaagattggaagcaggatcgaagtgtaaattgtcttcgccccaaaatccttcccaatcagcaaaaatccgatcacaagcaaaatggcatttagaaagaacgtaaggatcgacatggaaatcccggtgagctgggaaaataccagcgccagaccggaaatacttcccatgacgattttactgggaaccataaaaaaataaacggctgccgatacaatcagcatggcaaatgtgatcactgcaaattcccggactgtgttttttaatttcatgctgttacatctcctgcgtaaaaaatattataatttcgtaaaactccacaaattctcaatctgtggttccagtgtcgcataatcccaggtacggctgcttcgttctttactgtttggatcatgcacctgaatcttaccgtctgccatgcctgtcagcacgataaaatgtccgtctgttgtgaaatcgccctgcttcatactgcagatgatcggatgtcctgcattcaattcttctgtgacagagctttctgacaatgcaatctctgttcctgctactccaaaattcaaagcggcttccgtcatcagactccagctgcttccggagcctgccacataatatccgttggcgcctgcataggatgcgatcttatacggggtaatactgttatctccggtgagtcctgcaactaccatagcaagcgctgtcggaccacatccactgttcgctatgattccatctccataatgaatatacccccaccgttcatcccactggatcaagagcggaatctcaccttcttttacttctccgatggattcagcaggtgcctcatctttcttctccggataatctgccacgaaatctgttgtctctgcattttttgccagaagctccagcatactcaccggataattgcgggaatctgcaagaatcttttgtacttttttatcttcttttgcacgatcagagagtgtctgctgaaattctgctgataaggtgccgtcactgcatacgaaatcatagaccggagtctgcgtattttccgcttcagttttatcttccttttgagccgtattatcagtctgcgtctttgtctgcttttttttctgcgaatcttcttttgacagctgtcctgcgatccaccgtcctgcaagtgccagcaaagcgagcaaaatcaggatacagattgttcgttctaccagaacgaccttttttctgtcaaatcttctttttcttctttggtatgccatagttcaacctccggtaacagaataccacattcctacaatgctttccatacctgaattaattcttctttcatttccttcggtgtaatctgcttctcaatcccatttaaaatcctgccgctgttgacttctgccacctcgatcttgccataatccatccagacaaaacaggcaaaacaaaggatggaaagtcccagacgaaacaaaaaagagtgatcctctgctgcatcgtcctctgtgacagaagttgtaagatttccatatctcggatgaatcacaggcgtgcttctgcctgtctcatgataaagtctgcgtgtctgtctgagcagttctcttcggcgtgcttctgattcgttcataaaggttcctcctgtaaaaaagacatatgacgggcttcttacccccatcatatgtcttttttttaagaactagaacttatctgtctgccagttcttttacaatatcttcccatgtgacaccgcgttccaccatgagtaccatggcatgatacagaaaatcagaaatctcatatttgatctcttccgggttcggattcttggcagcgatcacgatctctgttgcttcctctcccacctttttcagaatcttgtcaatccccttatcaaacagatagttggtataagatccttccttcggatgctgctttctgtctgcaatcgttgcatatacagattcaaaaacctgaagcggatttttagaatcgtactcatttcctacaatctgccgataaaagcaggtatgatttccggtatggcaggccactccgatctgctctaccttggccagcaacgtatcgttgtcacagtcggctgacagcgcctttacatactgataatgtccggaggtttctccttttacccagcggcactgtctgcttctgctgtaataggtcatttttccagatttgagtgtatgttcaaatgcttcttcattcatgtaggccatcatcagaacctcgttggtcttataatcctgtacaacaactggaagaagtccgtccgtattcagcgtgaaatcagaaaaactcatcgtactttccagagaagtcatctgaattccttcagaaatgcaatgatttttgaatgcatcgatatcaagtgcaggttcgctgatcagcataccggaaacgcccttgacacccttgcattttaagatttttaaaatctcttcctgttccattgtatcagtcagaacaacgcacggaatctctgtgatattcatcacagaaagcagatccaggcgatgcatgaaaataatctcggaactgaatttgtcgatcagatgctgctgtttgaacaaagcatcaaaatcatttaaagatactgcgatccgttcttttccaaatcgtttggatacttcttcgatcagttcaaacgacagcggtttggaaaaattcaggattgcccgttttgcaccggtgtacagaatctttttcacgtcttcctgtctgcgtacatttccgcctgcaaccattggaatactgatggcacggtttacttttttcatcagatcgatcgcttcatcatgctcgtcatccgtattggacagatcgaatacgatcagctcatctgcccctttgtcacagtactgctttgcaagcccgatcacatcgtctgagacgacttctttatcatcaaaccattttattgcttttcccttgtaaataaagatacaggggatcaatcttttataactcatcgttttgttctcctttataagctgcctttcgtagaccataccccgttcatacgtggttcctccatggttgccatatccagagcctttccaaatgccttgaacaaggcttctgccatatggtgattgttccctccgtctacgatctttaaatgcaggttcatcgctgcgctgtaagagactgcataaaagaattcacggatcatctctgtatccagagttcccagtttttccactgtaaactctgcctgataattcaggtaagggcgaccagataagtctactgcacacatggcgagtgtctcgtccataggaagcagaaagcttccgtaacgcttgatcccttttttttctcccagtgctgctgcgattgcctgccccagtacgatcccggtatcctcgatcgtatgatgggaatccacctccagatctcctgttacgtgcaccttcagatcaaacagaccatgtctggcaaatccattcagcatatgatcaaaaaacggaattccggttgcaatctcattttccccggttccatccagattgatcgtcagagaaatgtccgtctcttttgtttttcgttcgattgttgctgcgcgctgttccatttttaatccctcttttcaaagcggacatggatggagtttgcatgtgccgtgagctgttctgcttttgcaaactgctcgatgtcctgatgtacggtctccagtgcttcttttgagtaagaaataatgctggattttttcaaaaagtcatctacagacaacggagagaagaatttggcagtcccgtttgtcggaaggacatgatttggtcctgcaaaataatctccaagaggctcactgctgtattctccgataaagatggcacccgcattgcgaatcttggtcatcacggtaaatgcatcttttgtcacgatttccagatgctcagatgcgatttcgtttgccgcgtcgatcgcgtcatccagtgtctcggcgatcagaatatgcccatagttatccagagatttctgaatgatctcacctctggagagctcttttacaaatccgtccacttcccgggatacttcttctgccagctcttcactggtcgtcacaagaattgcagatgccagctcatcatgttctgcctgggacagaagatccgctgccacgtaacgtggattggcagtctcgtctgcaagaacaaggatctcactcggtcctgcgatcgaatcaatgctgacatgaccgtacactgcttttttggcaagtgctacatagatattgcccggtcccacaatcttatccactttcgggatgctctcggttccataagcaagtgctgcgattgcctgtgcaccgcccactttatagactgcatccacacccgcttcctttgccgcaaccagcgttgccggattgactttaccgtcttttcccggcggcgtgaccataatgatctcatccacaccggccacttttgcgggaacgatattcatcagaacagaagacggataaacagcctttcctcccggtacatacacaccaaccctttgaagcgacgtcactttctgtcctaggatcgtaccgtccggtttgctgtcaaaccaactgtactgcatctgttttgcatgataggattcgatatttttcagtgattttcggatgacattcagaagagaggaatccacctgggaataggctttttgaatctcttcttctgttacctgaatattatccgcattaagtgctgcaccgtcaaatttttccgtataagcgaacacggcttcgtcacgtctgttttttacttcatccagaatctcgcggacacttgcttcatacgttccataactgttgggacttcttttgagcagatcttcgagcagattttttctggttgtttcatctaatcgttcaattctcatactgtttccccctccaaaagatttcggatccttccaatcagatcacggatccggtcattctccatccgcatgctgactggatttacgatcatgcgcgcagaaagcggacacacttcttcaagcaccgtcagtccgttttcctttaaggtggatcccgtctccacaatatcaacgatcacttcagaaagcccgacgatcggtgccagctcaatggagccgttcatcttgatgatctctacggtctgatgcttcttattataaaaatagtcctttgcgatctttgggtatttggttgccacgcggatcacctcacgatgctccaaaagctctttggcatcctgtggcccgcatacacacattctgcaggagccgaatccaagatccagtacctcatgtacgttgcgtccttcttccacgatcgtatctttgccgacaactccgatatctgctgctccatattcgacataagtcggaacatccggcccttttgcgaggaaaaactttaattttaattcttcattgacaaacaccagttttctggaatccttctctttcatttcttcacaggtgattccaagctgttccagcatctccagtgttttacttgccaggcgtcccttggtcagggcaaaggttaaatatttcatctgttctccctcgctttcgctttttttctggcatttaccttcttttcttctccggtagagaggtttaccatgtcaatcgtcagattctcgttcaaatacagcatgctgaccgcatgtgtccgttttccgtaagcgataaaggtctcttttgaatcttcctcagtccgtttcaaaagttccatgtattttcctttttcacggaaatcttttgccagtgcaatggcccatttttctgtggcatcggtatagacgatgagattgttgtgaccggtctccacagtgatcttctgtctggacagagcgttttgcagctcatcaatgataatggcaaatccgatcgacggcgtctgctttccaaacttttccagaagatggtcataacgtccgcctgtcacaatggcatcaccggttccgtaagtatagacccgaaatacaatcccggtatagtatccataatgaccgctcatactcagatcaaaggtcacataatcatcagccccatacaatgcaagcagtttataaatcttcaaaagccgtcccaccgcttgttttgcctgatcggtaggtgcatgctcaacggcctttttcagcacatccacatctcctgcgaactccggaagcagacggaacgtctcttttaattccggggaggcatccgcctgctctaagagttcctcgactccaaagaaattccggtttgcgatcagattatagatttcttcctgctgctcttttgaaagtcctgtagcttccatgaggctctgcaggaaatccacatgcccgatattcacctgaaattctttgagtcctacttttttcagaccatctacgaccatggcgatcatctcggcatctgcttccacagaatcgattccgatcagctcagcaccaagctgtgtactctcttttaagcgtccctgataactgctgtgattgataaaggtacttcccacataacaaagacggatcggaaagtcttcggtctcaaacagagttgctgccgctcttgcgatcgaaggagtgatatccggccgaagtgccagtgtatccccctcccggtcaaaaaacttatacagctctctggatgaaatcgtcccgatctctttgcggaacacatcaaaatattcaaaagtcggagtctgaatatcctgatatccgtaaagatgcagcacctgatgaagtttatcctgtactgccagctttgctctgcattcattactgtaaatatctcgaactccttcgggagtatgtaacttttgttccataattcataacaccctttcactttactatgctaatacattaaattattctgtaattatacgaactttcatttcttctgtcaatccctgtcatccaaatctttttgaatataatccagatatggaacaaaacaatgatttttcaaagccataaaatattccggggaaagttcttcaaaccggatacttttgcgcccgccggactgtgcccgtttccagaatttcaaaagctctccaaatctcatgtaatacaacgtttctttctgactgtaataaataatcagaaaagaaatcccctgctgtttttcatacttctccataaaagaaacctgatgctcgtgaacattctgaagcggaaatgtatctgcggcacactcttttgcgtcaaaacaaatgggaattccctgaacagctccgatataatccacggtgctgaccttgtcaaaataggcaagtgtgatatgacgccgttccttgtcaatccgaaccggagtgatcggggtcggcaccttctggatcagcgccagtcccatttcttcataccgggtatttgtgtaattgatcatatcttccagggtagaaccacgaagtccccttgaattccaggttcccattacaacacccctttttcggctgcaatcctgtaaaactgtttcggaagcggcgctgtaaactctttcttggatacgttgcataaggtttgcgtacataccggaaactgcagtctggcagcatgaagaagctgtgactgcaagtgatatttctgctcgtattcccggttgatctgcgatgctccgtatttgtggtctccaatcagcggatgtccgaccgaagccagatgggcacggatctggtgggtctttccggtgatcagatgcacttctaaaagcgttacaccgtcatgggactttatcggacggtattcggtgatgatccgtgcacttccaggtctttcctgaaacagtatttctactttgttggtgcgctcgtccttaaaaagccatccttctacccggctcggtttttcgatgattcccgctgtcaggcagagataatattttccaatggtgcgatcatgaaacatctggctgagtgactgcagtcctgccatgcttttccctgccgctacaattccgcttgtattgcggtccagacggttgcagatggaaggtctgaatgtccgaagatcctcctctgtcagtgcatggctctggatcagataagaaatcagatgctccaccaaagactcgtctgaccttgctgctttctgagagagcatccccacaggcttgttgatcagaataatatcctcatcctcatagagaatgtccagactgacatttgtatagccggaaaacgcttccgaaaatttttggatcgtttcatctgataaaaataattttacacggtcgccctttgccagcttttcattgccggacgcctttttcccgttcagcgtaatattttttttccggagcattttgtacaaaaaactcttcggggctttatttaagtatttgccaagcagcttgtcaaaccgctgcccggcttcctgttctgtaatcttgatttcctgcatgttttgtaactcctcattacatggagaggtttaaaagaagctgtctggtctgcgcttcttcctctccgtttattttggcattttctaccatggcgatcgattccagtccttcgatcctggagagaaaaaccttataatcctgataaaatttcacagtggaatacgaaagacgattctgcgtcatcatatccctgatatgtttggaaaggacgtttaaatcgacctttttgctgtctgtgtatccaaataccgttccgttggagatcaccacacactccaccggcatgattttttcacgggttgtcaggacaagatcgtatactctggtcgtatgcggtgcttttgtatcaacctcatgaaccagcttctgatctacagaagcataaggaaacctggtgataactcccaccagcgcttttgcggcaggaagacagccaagaattgccaccactgtcagaagattgcttcttgtttttgtctgtacgtagcccagtgtaaaaatggcagctacgagcagaaaataaatcacagtccggatgatttctacttttttcttataatccagataacctggagttcctttttcgattcgcttcatttgttcttctctcctacttttttccaatggtctgtacgtttaaaatccaactgaccggaacgatcctgaccagtatgtacagtgccctcatccagaacccgaagattgagactgctttttttcgtctcgcatccagaagtgcctgttttactacgtttggagcctttgccattgtcatttttttgagcggattttcaggttgcccgcaccgctcaaaaaattctgtgtccacaggtcccgggcagactgcagtgacatagattccttttttcttccactctgcgccaagagctctggaaaagctgagtacataagatttggtggctgcataaaccgcaaacccgggctgcggagcaaatgccgcagcagatgcaatctgcaggatccgacttccttgtgacagatagggcgcacacaaaagcgtcatgtttgtcaatgcctcgcagttgagacgcaccatctcactttgtgcgggccactcttcttttgcgatatccaaaacagtaccgctttttccgaagcctgctgcattcaccagcatccggatatcgggtcttagacgctgcagtgtatctttgaccgtttgaagaaacatcggatctgtcagatctcctgcaaagatgcggaccggaaccgaacaggtcttcgcgatcgcttccagtcggtcttttctgcgtgaaatgatccacaattcatccaggttcatatagaaatgcggaatctggcggacaaactcccgccccataccggaggatgccccggtgatcactgcaattttcatcttccacgcctcttttctgtcttctttttctgtacattccgtatggtctttttcttctgttttggtctgcccgttttgacaggctgttcctttttcaatctgcgcgggcggatcagacaattcttttcaaatccgatcagatctgttctgccggcttttttcagcgcctctgcaaccagatcatagttttccggattccgatactggatcaacgctctctgcagggctttctcatgcggatttttcggaacatagaccggtttcattgtccgcggatccacaccggtatagtacatacaggtagaaattgtagacggagtcggatagaaatcctgcacctgctccggcatatatccaagatctctgcagtattctgccagttccactgcttcttttaacgtcgatcccggatgagaggacatcagatacggcaccagatattgctcttttccgattttctggttcatggcataaaactttttcgtaaaggtctcatacacattgttggccggttttcccatcatagaaagaaccggatctgaaacgtgttccggtgccacctttaactgtccgctgacatgatactcacataattctttcaaaaacgtatcatctgcgtccgccagcagatagtcgaaacgaattccggaacggataaagactttcttcactttcggaacttttctcagctttcgcagaagtgctacatagtctttgtgatctgcattcaggtttttgcaaggtgtcgggaacagacactgctttgtcttacacacgcctttggtcatctgcttttcacaggatggatgccggaaatttgcagtcggtccgcccacatcatggatatatcccttaaaatcaggatcctgcgtgatctcctttgcctcctgcagcagagattcgtgacttcgtgtctgtacgatccgcccctggtggaaggtcagtgcgcagaagctgcatccgccaaaacagcccctgttgctgatcagactgaacttgatctctgcggtcgccggaactcctcccagtttttcataatccggatgggcacagcgggtaaacggcagtgcatagacatcatccatctccatctgtgtcagcggttttgccggagggttctgtaccacatataaatgttcggaatacggttcgaccagacgttttccggaaaatggatccgtattacagtactgggtgtaaaaacttctggcataagaaagcctgtccgcttttaattcttcaaaagacggaagcatcacggcatcataaaccgaatccagagattttgtcttgactgttgtcccgctgatgtaagtgatatctgacacggcaattcctgcatccagggcttccgcaatctctacgatcgagtgttcacccatcccgtaggaaatcatatctgctccggagtccagaaggacggaacgtttcagccggtcagaccagtaatcatagtgtgcaagccttcgaaggctcgcttcaattccgccgagaataactggcgtctgtttgtaggtctgacggatcaggtttccatagaccacggttgcataatccggacgcctgcccatcactcctccgggcgtataggcatcggattttctgcgctttttggagacagaatagtgattcaccatggaatccatattgccggcagatactaaaaatgcaagccttggctctccgtatatggtcacactgtctttgtccttccagtccggctgggaaatgatcccgatccgatagcctctggattccagaagtcttgtgatcacagcaggaccaaaagatggatgatcgacatacgcatccccggtaatatagacaaaatcaacccggtcccatcctctgtctttcatatcctgtctgcaaattggtaaaaacctttctctcatgtatttatactccacatctttcatatgtttttgcttggatctcatcataactgcggataaaatagtccgccttttcttttttctctttttcatcacttgccgagaatgcatcatccactgcacacactgtcattcccgcattgcgcccggcttcgatcccctttggaacatcttcaaataccagacactcttccggctgtacaccgaggtcctctgccactttcagataaacatccggtgcaggctttccttttttcacttcacatccggtgcgtacagaagaaaaatactcccggatctgcagcgcgtccagagcggcaagagccagctcctttgcattgctcgtagcaattcccatcaggatctgctcctgttttaaaaattccagaaatccttttgcccccggctttagctccacttgggtctgatacagatgcagtgtcatatcgatccactccttttgcacatcttccagcgaacaggagagctctggaaatacatccagaaaatactgtgcggtctctgtgtagctttttccctccaatgccttggcgaatccgggcggcggggtcagatggtatttctttaaaaagatccggtccacttccggccagatccacatggaatccgtcagcgtcccatccatatcaaaaattactgctttttttccactgagcatagtgtatccttctctttctctgtcaattcccggtattcgccgggcatcaaagtttcatccagctgaagcggtcccatactgagcctcttcagataaatgactttcttaccgactgcttcaaacatccgcttcacctgatgaaacttcccttcgcagatcgtcagaagaatctctgaaacttctcccgactttactacctccaacactgcaggagcagtcagctttttctcatggatatccacgccttctgcaaatttacggacatcttcctgcgtaacgatcccctgcactttcgcataatacgtcttatctacatgctttttcggggaaagcagccgatgcgccagttccccgtcattggtgatcagcagcaacccttcggtatctttatccagacgtcctaccggaaacagatcctttcttttgcgggaaacaatcaggtctatcaccgtcttttctctggcatcctctgttgccgaaatcaccccggcgggcttgtgcagcatataatattctttttttgtgtagccgacggtctgaccgtcgaatacaacggttgtctcttcggtatcgatctttgtttccggctttttcacacaagcgccatccacagacactctgcctttggaaatcgcccgctttacttctgttcttgtgcccactcccatatctgcgagatatttatccagtcttatcttcatctcttttcatccttatgactgccagcgccagcccggcagatatttgtttttcagcgtctggtttgccagttttccgaatccgagcggatatccgtccacacagaccagataccatcctttctccttgcgggagacaagatcttctacatccagagtctctccttttaaatatttgatcacacgttcatcctgtacggacaaatccagaatattggcatactcttcttttttcagtgacattgcaaacgcctgactcggttcaaaccgctttttcttaagttctccgagcagcaatccggttcttaaaaagcggacaccgttcagctttggaagtcccttcggcatatagtagactctctctccatggatatccagtcttgatgcttccggtttccaggaaacgttccggaaaaactcttccagctcttccggcagttttccgccttttttagaatccttttctttcagagcaatcggagagccttccccctttttcaacagtgcaagataatgtccttccccttccattcgatgcggaaaaatccggactgtctttgcaagatttgggtttttgctgtctgtcacttccggcattcccggtgcaaagccttcatatcctgccatctcacaaatctcaaactccggatattcttccagcagatattcgatggtctgctcattctctgacggatcaaaggtacaggtagagtacagcatcattccaccaggacgcaacatggatgccgcctgcgtgatgatacttcgctgaatttttgagaaaaactccggaccatgctcttcccatgctttgaccatctttttatcttttcgaaacattccttctccggaacacggagcatcgatcaggatcttgtcaaaatattccggaaaatactcggtcagcttgcccggctcttcgctgagcaccagcatatttccgattccgaataattcaatattcttcagcagacctttggctctggaattgctgatgtcatttgccatcagaactccttttccctgtaactttgccccaagctctgtcgcctttcctccgggagcggcacatacatccagcacccggtctcccggctcgatcaaaagccggtctgccggtgtcatcgcgcttggctcctgcagataatacagtcctgcaaaatagtacggatgctttgccggctggatctgatctccgtcataataaaatccatttgagatccatggaaccggacgcagcggccatggagcgattttcaagaaatcctccacggaaattttgtttatattgacacggagtccgtaatgacgcggctcctcatagcattttaaataatcctcatattcttcacccaaaaggtgtttcatcttttcttcaaatgtatttggtaaattcatattcattcctccacatgaacatgattataccataattcctatagtaagactacctagaatacacacattttattctggcattttctgcataccgcagcaccggatacggatttacactgatttcttccgttccttctttcagataaatcccaaggtggagatgcaccggaaactcccccgttgttccctcctctccatatccgctgtcccccatatagccgagcagatctcctgcctttaccgaatctcccttctcaagctccgcataagaatccagatgtgcataataaaaatacgctcccgtcggtgccgtgatcccaatcctccagccgcccttttccagccagcctttttcggttacgacaccatccgtcatgcttacaacaggataatacccgggcgtatttttctctgccataatatctgttccctcatgcccccgttttcctccgtaatttcgttcaaacatccaggaatcaacataagaaatcttatcctcggtatcatccagagactgcgggatggggaaatattttacatcattccagattgccctgcatgattgcacataagcatcccagcccgtttggtttcgccattggcggtacagcttctgaaatccggaaggtgagacttttcctggaaatctgcggttttcaaagtctgttgccatccagtagagtcccacgtcccgtcccggatctgcagcctgtttcaaataaacctgcatggtttcagaaacaggctgcctgcgaaaatcaggctgagataccaccggtttttgaagtctctgaaatccactgacagaaatcaaaaccccggtatttaatacggcaaaaaatgccagaagaaaaattcccgcaaaatagctgatatatctgtgacgcatagaactttctcccgttggatgtttcaaattatcgtatgccggtttcttctaaaactttccactgataaatgtcccatatcgtcatatacatataacaacaagtgaatcggagttttcctatgagaaaaaatctggccggaatcggagttctgatctgttttgcctttatgcttttatttccaaaagatgtatttaatggagccagcaaaggtctgctgctatggtttcatacggtctttcccacactgtttccctttttgatcatcacaaacctgctgatgtccaccaactgcatccgtctgattgcccgcctgttcggccctcttctgaacaaaatcttccgggtctctccaaacgggagctttgcgatcattgcaggctttctctgcggatatcctatgggcgccaaaatttccgcagacctgacacatacaaaacagatttcaccgcaggaaggagcgtatctgctctccttttgcaacaatacaagtccggtctttattttcaattttgtagtctggaaaacactgggaaaaagcgaactgatgattccgtccatcctgatcctgacagctgcgcccattctggtcagcttttttacgagaagaacgtatttgaagggaaaacaggcatttcaggctccggattcaggctggcagaaaaatacgttctggtcctttgacattttggatcactgcattatggacagctttgaagcaatcacaaaagtggggggctatatgattcttttctccgtgttgatcgcactgtcagaaaacctggcatcctgctttccggcggtccaaattcttctgccggttttggaaatcacaaacgggattcagctgattggaatgtctgccgtttcttttcctgtaaaatacattttggcgctctctctgacagcattcggaggcatatgcgctgccgcccagacacagtgcatgatacaaaaagccggtttttcaatctttccctacataacacaaaagctggctaccgctctggtaaccagcctgcttggcatcttatatcttttatgcttcgcctgagaactcctgtccttcttccggagtcggagactctaattctgcacgattcgtgcggacaacatcataacactcctgaagggagttgatcagtccgtcatattttgtcgtatagctgtctaatgtatgaccgataatactctctgcattggcaagcagatcatcggtatactggatcgcacccatacggatctcatttgcatccattgttgcattgtcgatgatctcctgagcctgtgcagtcgcctgtgtcacgatctcatttgcctgtgcatatgcctgctgcatgatctcatgctcactgacaagctctgttgtctgtacctgtgcttcttcgatcatcgcatcggcttttgcttttgcatccgcaaggatcgcatcccggttgctgatgatcttctgatatctcttgatctcatccggagtcttcattctgagttctctcaaaagctcatccagatgttctttatttacaataatctttgtcgaggataacggctgaaacttacaatctttgtcaatgtactcttcaatctcctcaataatctgttcaatacggctgctcatagttacactctcctttttgctttcatcttcgcttccaactctcctgctaccgcttctggcacaaactgtgatacatctcccccataagcggcaatctccctgacggttgtagagcttaagtaagaatattcgatactggtagtcagaaacatcgtctccagatccggctccagtttatggttcgtctgcgacatctgcaattcatattcaaaatctgtaattgcccgaagtcctctgatgatcacaaaggcatccatctgacgggcaaaatctatcaaaagtccgtgaaatggaacaattctgacatttgtcagatctttggtcgcttcctctaacattttaacacgttcttctacagaaaacaacggcattttcgcattattattcagcacaccgacaaccagttcatccacaattttacaggatctgcggataatatctaaatgtccgtatgtaacagggtcaaaactgcccggataaatggctcttaacatatcatttcctttccagctttctcaatgaaaacatgcttgttcgtcttgtattctttctctttgatcagtgtgaagcccaaatcttccagataagaaaagtccgtatgctttgatgcttccacaatgatcacggtatcctcataaatcagttcggaaccggacagatacgtaagaacctgtctctccagatcctgatcatacggaggatccataaatacaaaatcaaacactttctcgccttccagctgatacagagctgtcagaacatctttcgtcatggtcatcgctttctcagaaagctttgtatagtttaaattttctttgacacaggccatcgcttttggattcttttcgacaaaaacagcctctttggcgcctctgctcaatgcctcgatgccaattccgccacttccggcaaacaagtccagaaaaacgcttccgaaaacagacggcgcgatcatattgaacagtgtctctttgatcctgtctgttgttggtctggtctccattccgtccaaagtttttaactgcagtctctttgcagttcctgcgatcactctcattgcgcacctccactttctcaactatgctgaattttagcagaaaaaagcactcaggtcaatcccaagtgcttttttccgcctgatttcgcattggcaacagtgactgcttatttaccggccatctgtttttcctgctgctcgatcattttctttaccatataaccacctacagatccgttctgtttggaagttaagtctccgttgtaaccgtctgacagcggtactccaagctcgcttgctacctcgtatttgaatttgtccagtgctccctttgcttctggtactgctgctcgattagatgaacgacttgccatgataatttcctccttttcgtaacttcttttgttacctctttttgtagttttataacctaagcccgggccgcatcgacatgaaagctgctgcattgtgatgcggctcgtctcatgtgtctgcattccgttcgcttgtgttacatccatagtatatggaggaattttatttttaatctggtaagttctggtatttttaaagtgtcatttctaacatcacatctgacagatagtgttttaagcgatcggccagccgccggtttctttctgatttcagtccgggatccgtccgcagcagttctcctgcagcttcggcagcttgttttaggatcagagaatcctggaacacatctcccagtttaaaatccatcagaccactctgccggattccaaagagatcgcccggtccccgaagtcttaaatcttctcccgcgataaaaaatccgtcattggactgattgaggatacccagacgctcttttgtttcttttgatttggaaggactcataaaaatacagtaggactgatgtcctcctcttcctacccggccgcggagctgatgaagctgagcgaggccaaaacgttctgcattttcgatcatcataactgttgcattcggaacatcaatcccgacttcgatcaccgtcgtggatacaaggatctggatctcatttttcccgaatgcttccatgatctcatctttttgtgcctgcttcatttttccgtgaagacaccccactttgacagactcacccatgatatcctgaagcatctgggaataatcggttacattttctgcttccagcgcttcactctcctcgaccatcggacagatcacatagcactgtctgcctgattgcacttgctttttcataaatgtatacgctgtattccgatatccggtatccaccacacaatttttgattggaagtctgtttttcggcaattcatcgatgactgaaatatccagatctccgtagaggatgattgccagtgtccgcgggatcggggtggcgctcatgaccaggatgtgaggcaacactccttttcctgccagcgtctctctttgtttgactccaaaacgatgctgctcatctgttaccaccagcgccagattctgatactgcactttttcttgaatcagtgcatgagtcccgatcacaatatctgcctctcccgcttcaattctggcataagcctcccgttttgcttttgctgtcatggaaccggtaaggagctccgttttcagcgggattccgtatgcttccagcatgccgctgatattttcataatgttgtctggcaagcacttctgtgggtgccatcatcgcgctctgatatccatttaagccggtatacatcaaagcaagaagtgccacaatcgtttttccggatcccacatccccctgtaccagccttgacatgacagattctccggagatatcccgcaaaatctcctgccatactttcttctgtgcgcctgtcagttcatagggaagtgcgtgaagaaattcgtccaccttcggctgatcacagaatccataatgattcttggcacggtcttcccgttccttgatcattctcagggaaagcacgaaaatcagaaattcttcaaatacaaagcgctttcttgcttcatagaattcttcttttatctccgggaaatggattccttccattgcagttcttcgatccagaaggtgatatcggcagatcagctcttccggaagaaattcctggattccttccacctgctccaatgcctgagcgaccgctttttttaccgcattattggtcagtcctgccgtcagggcataaacgggctgcattgtatttcttttttcctcgtaagaggcactgggatagaaaatctccggatgctccatcaccagtgcgtcctttttgcgcacaatccttccgcgcagagtgatcacgcctccccgtcccagtgtgttgcgaagaaacggcatccgaaaccagatcactttcaaagtgccggtcatgtctttcagatagagtgtggtgatctgcatttttttattctgactgacctggatcctcccgaagatcgcgccggtgacagtgactgtctttccctcctggatctctccgatggaaatcggatcttcatagatatcataggtcctcggataatacgcaagcaggtccccaatggtatggacacctgcttttataaataattgttctgttttttcaccaacgccttttaagacgctgattctttcagattctctcataaatgaaacaacttcctattctacagataatacgtagtagtagatcggctgtccgccgcagtggaaatcaacatctacatccggatagatctcttcaatctcgcctgcaaaacgctctgcatcttcttccagaacatcctgtccgtaatacagactgatcagttctgtatcatcatccacaagctgagaaagcatctcttttgtcgtctgctctacagactgaccgacagaaaggattccggcatcaccgattcccatgatatctccttcatggatctctttatcgtcaatatgggtatcacgcacagcgtacgtaacctgccccgtctttacattcttgatctcttccagcatggtctccatgttggtatcaacgtcctcttccggcatatagttgatgatcgctgtaattccctgtggaactgtctttgtcggaatcacgatgatatctttgtcctttgtcagatcttttgcctgatttgctgccaggacaatgttcttgttattaggcagaatgaaaatgtgatctgcattgaccgcatcgatcgcagtgagcatatcctctgtacttgggttcatcgtctgacctccttcgatcagataatccacaccaagttctctgaaaatctcgttcatcccttctccgatggatactgcaataaacccaaccggcttgcgaggtgcttttttcgcctgttctgctgcaactttttccgcatcacgaatcagcttttcctgatgctcttctctcatgttgtcaaccttcatacgggacagctgtccgtatttgagtcctttttcaaaggccagtcccggatgatttgtatgaacgtggatcttcacaatatcttcatccgccacacatacgatggaatctccaatggactccaggtaggatttaaactccatttcatctgcttctgtaaaggccttatctgtcataatgataaattctgtacaatatccgaacttgatgtccgcttcagcctgcgcacctgctttggtcatctttgttcctgcacttgcttcgatcgcactgtaatcgatctctttgccaagaaatgcatcataggcgccatgtaacacttccagaagtccctgtccgccggaatccactacgccggcttctttcagtacaggaagcatctccggtgtctgatccagcacttctttggcatatgccagaactgccggcaaaaactcttccagatcatctgtcacctctgccatctcagctgctttctgagcgattccttttgcaactgtcaggatcgtaccttctttcggtttcatgaccgccttgtaagcagttgctcttgcacgctcacatgcctgtgcaagtacaatcgtatcgatctctttttcttcccggatcgtctttgtaaatcctctcagaagctgagaaaggattactcccgagtttcctctggctcctcgaagagaaccggaagaaatcgcttttgccagagattccatatccggtctctccatggcgctgacttcctttgcagctgacatgatcgtcaaagtcatattcgttccagtatctccatccggtacagggaatacattcagttcattgatgaattctttttttgcctccagatttgccgctcccgccagaaacatttttgcgagcagctctgcattgatcgtttttgttgccacagcaaatatcctccttaatctatcactctgacaccttcaacgaagatgttgatcttatctacggtcatcccggtgaattcttccactttatatttgacgttgttcatcaaattatcagaaacagaaagaatatttactccatatgcaacgatcacatggaaatccagaaccaggatattgtcatctgaaatatccacatggatcccatgggtcagactttctctttttaacagccgcacaagaccatctttcatgttcacgacagccatacctacaattccaaaacattctacagcaacagagcctgcgtatttagcaataacttccgggctaattgtgataatcccaagctctgtactcatactacctttcatcatatattacctccaattcttaatggatcttcgcacaattaacattcgtattatactctcattatccggattttacaatatcgattcataaagtgctgtcaaaacattcaaaatctcgtcctctgacatggccgaactgtccaggcacagatcgtactgggacatctcttcccacttcttgtctgtatagtagttataatagaattttcgctgtttatcgacctttttgatcagagaaagcgcctctttttcttccagagaggtacgctccatcactgtctgaagcctgtagtccaatggtgcatgaataaaaatactccgggatgtcgggcgggatttcaggatatcattggcgcatcgtcctacaatgatacaatcctccgtatctgccagacgtgtgatgatctgtgcctgtgtgtagaacagtacatcgttcatcggttcaaaccgaaaacggctttccatctgcgccggatcttctaccgggtaacgccatggattcgctcttttttcatctactttaaccagctcatcataagaaatatcattctgttcactggcaagcttgatcagttctttgtcataataatgaattcccagcttttcggataacttctttgcaattctgcgtccgttgctgccatactgtcttccgattgtaatgatacgtctgctcataatcattcaccgctttccgcctgtcatcaaggcgtttgaagttatttgaagttactttaattttatcatgaaatgaaattgatgtgaacaaaaaacccgatagaattcacaaaaaatcccatatattgatctttacaaaaaagaatttcaaaaaaagacttgcattcagagggggtttctgctagaataacagtgttgtgagtctgtataagactatttcagattgttaggaggtgcaatgatggctaaatgtgctatttgtgaaaagggtgctcacttcggaaacaacgtaagtcactctcatagaaaaacaccaaaaatgtggaaatcaaatgtgaaatccgttagagtgaaaacagaaggcggagctaagaaaatgtacgtttgtacttcttgtttaaaatcaggatgcgttgagcgtgcataatctgttatatgacgacacggaataaaaaggcttgatatttactttgtaaatatggagtcttttttcatgctttactcgccagaaaaaacagatgcccagccggacacctgctcttcatttacaaaacagacaatatcctattaaaagcaacgcagtaatgatcgcaatcccccatggaatactcgataacaggagcatgatcagcattcccactgcgacgaaaatcagcgcaaatccgatcacccgtttcaaaatacatcacacccaccggccctcttactgcaaatatatgacagatatttcaaaataatactctgattttatacgttttcttctttttcagcagaatctaaaatctctgccacatctgcttctgttactttatcttcttttttctctgtaaaacggtccaccagatccggtaccatatccagaatttttgtcatcgtatcctgatttctcacatttacaagcttggtcgttccattcttgatcacaagaactgcactcggggtaatctttccaccgattccacccattcctttttcgcgtttttcagcacgaaaagaaccggctccgattccaaaggaaacatctacaagcggaagaatgatcgtatcacccacatgaattgcgtcaccgacaaccgtcttagatgagatcattccgtccattccctgaaacaatgcttccacagttgatttaaaattgttgttattctctgccatttgctgttttcctcctttggctttttggttgtattctaaaagcgtaattttctgatatgggaaatcgtcgtgcggatattcttgttccacagcagattccatagaacaatcacaaaataaacggcatgcaccctccccttgatcatggcctttcctttgagcactttctcgtcaaaattcggagtgatctccacacattctccgataaacggatagataagactcgctcccgccagaacatatcctgtgacagaagggtctgaaaacccgaattccagatctgcctcacactttgacggcttcaaaaagcaaaacaaacgtcgaagctctgtgaggcatttcataaaagctgaccgatgaatttcatccgtaagaaactccatcaatctttcctttttttctgccagtgatttgagcatatcacaaattttatgaaaagtacattttatctgttccgctttttgagaaatccgctctccaagtcccggtcttgaatcctgtttctttttgttttcggttttcttatgttctgttattttcttttgtgttggttccggctgttttttaagttgttctgaaggctcttttttctgtatacttttttcagaaggaggagacttcagtgtttctttactctgagagtgcttctcttctgtccgggaaacagatggggctgcctgttcgggctgatccgccagaaactgcttccatgcgattcgaaacttccattttaacgctccttcctggtacgacacctctccttttacaagggaacacagccaggaaaacttcagcgaggagaacaggtttttccattcaccttcccccaggacatctccccgatatctgaccggcacaaaaagaaagatacctgccaacaggatcagtattcccaatattaccagtaatatccagcctatgatttttaaaatcaacagaagtatatgtatcatatgattctacacactgccttccccagattgtttctgattatttaagatgaactctcttagtctgacatcatttgttttttggtacacatcctgcacgatttcttctgtcagctccagcgccccttcgtatccatccgcgagaccgactacgaacagcccagcgtcctcaaaaatatgctgcttcagcaacaatacagagaaaaattccagtggattttgttttccctgggctaacacgatcagataaagatcctttcgaaaccgtttctttttcaagccctcaataatccttttttcacgttttttcagagaacggcttacatacaattctctataaaactccatattcatgcagtctgtcatcccctttatgcttgttcttttctattgataataataagaatccaacacctgctttgcaattggaactgcttttgcgccggcatttccgtcataaccctcgatgatcacactgatgaccagttccgggttgtccacattcgtaaagcctacgaaccaggaatgtgttttttccccgtctgtcatgctatattctgcagttccggtttttcccgccacggaataagactgtccggaaagcatcgttgcagttccttcatccacaactgcccgcatatagtctttcaactgtaacgcctcctccgatgtcatcagttttttataacttttcggtacatttttccgaatctcggttcctttatagtttgtgactttatcaaccagatatggttccattaaagttccgccatttgcgatcgcctgtgtgatcagtgccatgtgatacgggctgaccaatgtgtttccctgtcccatagccgtcatcatcatctctccgtcactggtattctcatccactacaaacgagctttttgaataatccagcacggatggcagctttttgttaaacagaagctcttcggccgtcgcacggtaagaattccgatccagcatcagaccaatgtttgcaaaggaagagttgcaggagtttgcaaaagaactgcgcaagtcttccaatccatgtaccgtactgtcaaaacatcggatcgtgatgtcttcataactgatcgatccttcacaattatagctgtaattttgatagtccgaatgttctttcatatattccagtgcagtcacgatcttaaaggtagatcccggagcatatgccccttgagtcacccggttcagaagcggactgtaagtactgtctgcatttaaagcttcccaatcttgcgtgattgtattcggatcataggacggtccggacaccatggcaagaatttttccggtgctggcctccataaccatgatcgcgccccgattcgctcccaatgcattgtatgccgcctgctgaagccccgcatccaatgtcgttacgacggtatcgccatgatttttttcatccttaaattcattgagaaatttttccgcaaaaaatgcattggacgtcagaagttctgagttttcgatggattccagtccgctttttcctgcggtctcattgctgtagccgacaacatgggcaaatgctgccccgtacggatagactctgttttctgttccgtcctctccgacctgtgtctcggcaagaacttctccatctctgtccgtaatgcttccccggatgatccggtctgcaaaggcatcttgtcttacgttatacggactgttgacgattgtctttgcccggaacacattaaaataaacaatataggagatcagggcaagaaacagcgtaacaaacaaataggtcatcttagcgaactctttgtttcggaacttcttcgaagcctggctctttggttgtctttttcttctttgtggttcttctcttcgtgccatttcttaactctctttctctctttctttccagattttcttcctcatcttctcttaaaatatacagaccctgtatgatgccgaacatgatcatcgtacttaaaattgagcttcctccgtagctgacaagaggaagagttacgcccgtagaagggataaattttgtcactccgccgatatttaaaaatacctggaaaatataacaggttccaagtcccaacgctaccagtttatagaattgattgcggagtgccagcgcaatgtttaaaaacatcacataacagctgacgcacaccagaatcagacacagggaaagaatcagtcccatttcttccgaaatcgcagcaaagataaagtctgtatcagctacaggaatctcatccggaagtccctgaaacagccccattccaaaccagcttcctgtgccaatggcaaacaaagactgcgctacctgatatccgccgtcactataggttgcaaacggatctttccatgcagctacacgtacctgaatgtgcgcaaataaatggtatgccagtacggcagcgaccgaaccgcctccgagaccggctgccacataaagtggctgtctcgttgccgtgtacagcatgaccagatacactacgaataaaatcaatgccgtaccaaggtctgtagaaagcacgaggatcagcacatgagctgctgccagtgctgttgtaatcacgatgttcttaaactccaaagaacggtttaaatttgccgctacaaaaaatacaaataaaattttcacaaactcggacggctgtattccgaatccggcgatcgtaaatccaagctttgctccaccggaaacctctgccagaacggcaaccaggaccaacgccagaatcccggctcctgcatacatatagccccagtcttttaaacgatccagcttacggatcacaaccggtaccaccaaaccgatcacaactcctactgcggcgaagatcagctgcttgatcgcattttcttcttccagtctggtcagcatgatcatcccgatacaaagaagcatgcacatattattaacgatcagcttggacaccttcggatataaaatccggtacaacagaatcacagccagaagaaaacccgcgctggctgcataaagagtcagtattttgggatcatccttcttcagatacatgaccacatatgctgtcagctgaagtaaaaacatcagcacattctgccggatcaggatccatttctgctcgctctcataattatgtgcgaaaacagagaaacacgaaaacgtgtaaattcccattaaaaggatcataagatattttgataattctactatgatgttaaccacaatttcacctgcttttatgttattccgcgtctgaaatgaccgcgcgtaaattcttctcctgacattcccgatgccgcatttagggtattattcacagcaagagccgcattcaagatgcgagtcacctcgctgcctgtctctgtcgaaaactgcacacggatgcttcttggatgcatcctcatccactcttctctttcatcaaacaacgataaaggagcggaattgtaaacaatattatagcaaaatccgcagtgatttttcaccgggaactgttttcctctgcgatccgtcagtgttgtcgtgaccgggtggtgtgtacagccatttgttgtcttcaccacacactgcgcagatgtcataaccggaattcttccatagatcacaagttcactttcctcaagtcccagaacattcagctcctctgcatttaattccatcggagctgtaaacagttctacaccgttccttttccagaattgccggctgtattgattgaatacatacagattatgatccagaaggagcgtcctgtcaaatccgtgttgttttaaaaactgaaaactctcacagtttctgatcaatacaccgtcctgtgcgatttccagaaaccgatcataatgttgttcaaattttcgaactgcatcagcccggaaaatatggggcattgccagaaaaatcttgacactgcttcttttcgctttttcacagaggtgctgcagtctcgcatcttcaaataaatcctgtactatattactgtcaatataaatccgttctgctgcctctgaatccagcacactttccagctgttccaaagtctctgtcagaacactcagcagtaccccttccgtttccttttcttctgatttttgtttcaaaagaggttgtttcgtggatgtccgccggaacttcccgcatatctccagttctaatttttctaatgcctgccttcttaattcattgagctgctgcattggaagaaacacctttccttccagatcaatctccagatgttcaaatacaaattctgtggcccctgtcttagaaagttgcttttggattctggacacctccatcggctgattctgtgcctcctgcacagtctgctcggaataaacggtaacgcttatatcttctgtccagactgtcagcattgccggttctcccactgccgcacgcaggtatccggatatctgctctttcgttgccccttccagatactgttctttcatctctgtcatcagtttctggttacggattcgattcagaacttgtcctttttgatactgttcctttttgggaaccagaatcacagtctttgttccctttggaatctcttttccaaaagagtaattctcacgctgcagattcaactccaggagatctcccttgtggatatctgctaaagtctccaccgtcagttctcttcctttctgtgagagcacacgtgccgcaggtactcctgcatggttcgggcgggaaatggcgatcatatcccggccgtttcgttctttataataaccctggctgaatccgccccgattatacagatccatcagcgcttcccggtctgcctgttctacccgatatccactttttcccttttttagatacaaatctgtatacttccggtaaatcgatgtcacggccgctacatactcgggccgcttcattcttccctcaatcttaaatgaatagacgcccgcctcgatcagctccggaatcaaatccagagtacaaatgtcttttggactgagcacgtattcttttttgctgctctgatccacactgtacgggagacggcacggctgggcacactgccctctgtttccactgcgtcctccgatcaggctgctgagcaggcactggccggaatagcagtaacacaacgccccatggacaaagcactcaatctccatccctgttgcacgataaatctcctgaatctcttccagagaaatctcccttgccgggaccactcttgtcactccctgactttgtaaaaactgcgctgccttgacattaactgaggacatctgtgtacttgcatgaatctccagatccggaaaatcatgccggattaattcaagcactccgacatcctgtacgatcaccgcatctaagccatgcagatacaagggttccaaatagtcatgaagtgtctcgatctcccggtctttcagaagtgtattgactgtaagatacacttttcttccatggaagtgtgcataatcaatggcctgctttaatgtctcttctgtaaaattgtctgcgaatgcgcgagctccgaatctgggacctcctgcatagacggcatccgcacccgcatggatcgcagccagaaagctctcataggatcctgccggagataaaatctctatctgtggttttttcttttcttctatcaatcaataactcctttttctatttacataaaaagagggccaaacaaaagctgcttgcttctgcagtctcttgggcaccctcattcttttactttctgcgattcttcatctctgtttccagcttcacgatctgcatctgaagatcgttgttttcctctttcatcttagcgagctctttttccgcattctccaacttgatctgtacggaaattaattcatgctttaagtcatacatctctttatctttcagttcgatgtcactctccagtgaatctccctgcttctttgccttaaaataatcatctgcaatattcagtgccaaaagtacatttctggtgtctgcactctgcttgcggtaaccttcgctgttggcacattctgttatcttatggttcagataggaagatactttctgcagatactcttcaccctcaaatccacttagcgtatagacttttcctccaattaaaacttctgtaaaatgttttgctgaactcatagcatcctccttggcatttcttatctgttattataaactatctgcaaacaaaaaccaactattttttgaagtttctgtgtgaccgctcaccttgaaaccggaggaagaattccaagatgccggtatgccagatctgtcacaactcttcctctcggtgtacgctggataaatccacacttcagcagatatggttcgtatacatcctccagtgttccggaatcttctgaaatgctggctgcaagcgtatccagccccaccggacctccctgaaacttttcaatcatgacctgcaggatcatccggtctccgtggtccagtccataacggtccacatccagaagatccagtgcataatttgctacttcttccgtgatcacaccgtcatatttgacctgtgcaaaatcacgcacccgctttagcagacggttggcaagccgcggagttcctctggagcgtttggcaagctcaagcgctccttttgtatcaatctcgacattgagcactctggccgaacgcttgatgatcgtcatcaactcttcttctgtataaaactcaagacgattcacaactccaaaacgatcccgcaggggtgcggtgagcatccctgctctcgtagtcgctcccaccagggtaaacttcggaagatccagacggatcgaacgtgcggtcgcgccctttccgatcataatatcaatcgcatagtcttccatcgccggatacagcacttcctccacctgccggttcaatcggtgaatctcatccacaaacagcacatcatgctcctgcagattattcaaaatagcagccatctctcccggcttttcaatcgccggcccggaagtcaccttgagattcacccccatttcattggcgatgattcctgcaagcgtcgtctttccgagtcccggcggtccatagaacaatacatggtctaacgcctcgtctctttcttttgccgcccggatataaacttccagcatcttcttcgcttttgcctgtcctatgtagtccgaaagaagctgcggccgcagatgattctctatcttcgcatcttcttccagattttctgttgtgataattcgtcttcccatatgcttcctctactatatctataacatttttttcaatgcttctttgagtacgtcttccacagaggtatactctgtcacctggcgtactgccttcagactctcggcattgccatatccaagagccactaaagcctgtactgcctctgtctggatatcaccgtttcgcccatctgatggaatctctgcggcggctgcgcttcgcggctctaacatctccttaagatccagcttgtctttcaattcgatgatcagcttctcggctgtcttctttccaatcccgggtgctgcacagattgccttggcgtcacctgacaataccgcaaacttgagttcatccgccgagagacaggataagatattcagtccgccttttggcccgattccgctcacgccgatgaccagtcggaacacttcaagatcgtctcttgtcagaaatccaaacagctgcatcgcatcttcccgcacattcagatacgtgtgaatctttacttcacatccaatcggccccaaaaggctcagggactgctccggcatataaattccgtatcctactccctgtacatctacgattgccttgtcccgttccaagcctgccagttcccctctaatatatgaaatcatagcttctgtttccttttcttctatacttattctgcttttttcaaaaaagcagtccttttgagtacttcactggatacaattccaatcagaagccccgttaccagccccgatatgagcaaaaccgggaaataatacccgacctgataggtctctacgatcatcatcgcgagcaacagctgcccgatgttatgaaatacacctcctgcgatgctgactccctggatactgaaaccaccggtcctacgaagcaacaccatgatggcgagactgaaaacgccccctgccatactgtagagaatcatactcagattcccaaacaaaaatccggacagcagaattctggttacagataaaagaaacgcttcttttcctccatatgtatacaaaacaatgacgattaccagatttgccagccccagttttatcccagggattccaaaagaaatcgggatcaaggtctccacatagctcaaaataagcgccagcgaagtaaacacaccaaaatatgctgtcttattcttcatctgtcctctcctgtttttaaatgttaattcacgattccatccagttcactctctttactgccctgtacactcactacgacctgattcggaagacagatgatactctctcccgtcctggagattgccttctggtgtacgcagagctgatccggacagtctgcccactccatcttcgcctgtccattctgaatacgcagacgattcccatcctgaatctctatcgtctgatcctttgccagtgaatacgtaccatacacttctccgtctacggtgacaactgcctcctgtgcctcttttcctgtcagcaaaaaaaatcccgcacacactgctgctaccaaaagtatgcatccaatcaaaatataatctcgttttttcatagttatatcctttcagagttttatcatagcacactgcactcaggaatgcaaccattcattcgaccgtatgttcgggttgcattcttttacaaaaatctccggatcgggatggtaatcacccggagcactgcataaaaaatctttttctcggtggacatttcacgcggatgataattctcttcataatgatattctccgctgtccgtcattgttctgctataggttttgtcgcgatcgatttcttctcttaattctgctgacagtgcttctgaatcaatcgcaagcatcaattccgtatcctgatacgtactgcgcatatccaggttgtaggaacctacgatactgagtctgtcatcaatgagcactgctttggtatgattggaatgaggccccagatattcgtgcacctgcacaccggttgcccagattttttctttttggttcaaataatctgtacacccccacggattggctccgcttgacacatcattggtaataatctccacattcgttccctgttcacaagtatttttcagatctgcatacatctcttttccgcagataatataaggcgtgcaaatgactgtatttttccctgtctgaagcagctggttgacagaataccacatatgaggctctttgttttttgcttcaatcggattggaaagaagggttacctttgcagtctctaccgtccgcgcttcccaatcccaggtttttaaaatgtccggatataacgcttcaagtttcggatatcgttcttccagttctttcagactgttctgtacacggtcagtcttctttttacagcggtattctttactgtccgaaagctcccacacgcgttcaaaatatgccttcagctgttttaaagaggcactttctccttcctttgcatagataaaaatctctttgtcaatattctgatgctttccataatctcccaaaaacagattggtcgtatttcttccgcccaaaaggtacatcgaagaatctgtgatcacgtatttatcatggagtcttgcctgcatcgtccacggcttcaacagattaaccggattgtacactttcacttctatattttctgtagaggcgagtgcctgaaaatacggatctcccagcatatctaaaaatccactgattccatctacgatcagacgaacatgcacattcctgtgtgctgcctcgatcagcgcactcatcacatcttttcctccggtatccgcattaaaatcaaaagtcgatacgatcacttcttctttcgcttcccggatcattttcaatcgatattccaaagcttctgtattatccgtaatgtaagccgcccgttcttttcccggctcctcagaataacattcctgtggatcaaactgtttcttataatgatccgatacttttttatgctgaacataaggaatcgtcagtgctgcgatatacaaaagaactgcgatcagacaaaatcttccccagcgtatttttttctttcctgtttttaaatcgtatgttctcacctctgccacctctctgtttccccatagttaagaggtagtatagttcgctcctgcccaaaagtcaagtacgctattttgttgtattttacgggaaatttcgttataataagcgaaacactcaaacacaaggagatttctttatgaaccagatcaaatcgattagaaaattatgctttattccgctgctctttctgcttcttttttctctcagtggctgtgcctcatctgcagaaccgctccagatgaacgggatgtattttgatacaatcgttacgatccgcatatgggatacttccgatcgctctgttctggaagaatgcgaaaagctttgtcaaaaatatgaaaatctgttcagccggaccattgataccagtgatgtttccaggatcaatcaggcaaacggacagcctgtgactgtagatcaggaaacagctgatctgatcaaaaccgcactgcactatggggatttatcagatgggaaatttgatatcaccattgctccgttaagtgagctctggaatttcggacataatgacggacagattccagatccagctgccattgaggaagccagaagtcatgtgaattacaaaaacgtcaaagtggacggtactaccgttcagcttctggatccaaaggctgccatcgatcttggagcgattgcaaagggctatattgcagatcagctgaaagagtatctggaaagcgccgggattaaacacggactgatttcccttggcggaaataccgtggcaatcggggaaaagccggatgggtcaccttttaagatcggcgttcaaaaaccctttgccgagcaaaatgatatccttacaagtcttgatatcagaaatcaatctgtggtttcttccggaacctacgagcgctattttgaaaaagacggaaaaatttaccatcacattttaaatccgtttaccggatatccttacgagactcatctgcagcaggttacgatcatctcggatgcttctgtagatggagacgccttaagtaccacttgttttgcacttggtctggaagagggatcaaaactgatcaaatcactggacgaaatcgaagctattttcgtgacagatgacggaaacatccatcgggtggggtgatatcactcccaccccaaatgtgttctttttacaatcattcttggcatgaactttaaaatcccatttctgtccacattggtcagaaatgggattttcttgatctgtcagatcactcgttcgaaaaactgtaatttgcctttctgtgatagtttgtcacaaacctttctaatgaatgcaatgccattggaagaatgatgcatcttgcagcgtaaaaaacatatccgattccgatggaaaacacaaaggatgatatcacctcaatcagcggtttctttacagaaacctgcttttgaatgacaactgcttgaaaaatgatgtctccgcaccagatcaatgcattgatcagaatgcaactcagcaaattaaggttccacttcaacagcaaccataagacgatggcctgcatcatagctctttgcggtatttccatgcaggcagcttcaatacacattcctatcagttcagtcggtttataagcttcttttgttcgtgatccgaacattaccatggcacatgttgccactaacgtaacagcggcgataacccagactttataatcaatcaacttttcaaaatgaaacggataatcacccatcagcagccatataatgatcgtcggtatgattgcggtaagcaagggcgaaaacatcaatgccttctttgtattcttcaatttttgagatacatatatgtggaaggaaaaccatattccacttaataaaaatcctataataaaaacaattggataaagcatttataaactccgtttataaaaagtccaaaaactccgaattttctccataatggctctatgtaatgcttattcatttccagtgctttaactgtgaaagatatatgttaaattgagctcgcctgtcatccactcccagattatcaggattcggcatatgttccacaagataatccaataaagactctcttgactgatatacaaacttcccctctgcataacaccacttacaataatcttcgttgtagcttccatctttctcccggctgatgaatgcatcttcatttaagggcattccacagcattgacaaatgagctgacgaggagagcccagaagcgtattgacggaaacttcaaactcctgtgataacagttttaatgtatctgtattaggttgtgtctctcctgtttcccaacgactgacagcctgtctggtaaccatcacacgtttcgccatttgctcctgtgtgagactatttttctcgcgcagctttttaagcacatctttcatttccatattagttccctcctttgtgtaatatcttatctctattatgaagcctctctatggttttaacaagcaacctgcagttgctaagaagttcttgtaatcacacatcaggagtcgcttttaccggattcagcagcttccatctgttttttcacatctacaaggctaatccacactcaaacgctaacagcatgtatttctcagcattcgtaagtccatacaattccagatctcgaatttcccatttttccgaactgagactatccgccccatacagaaattgtataaatggaatctgccggtattgtgaaactgccagcatagatgcacattccatttcaaccgcaagacagccttcctgcctgcgttcctcaatcgctggaatggtttctctgtaaattgcatccgaggtccatgtttttccttttacataggaatacccacagaattccaatacattctgcagtacccgaatggaatgttccgacgctttaatttcctctgatggagctatgtaatgatagcttgttccttcatcacggactgcagaaaccggaataatcatgttatccttcactttctcatcatccaacacaccgcaggaaccaaacattacaaacttctttgcacccatggcaacaacttcctcaaatcctgccacacacgccggtgcccctactctggataaataaaatgcaatatcctgatttttgtaataagttttataaacaggcaaagctccattggccgtatatagttctgcaatcttctctacacttttcaaggaagcaaacttctgaataatattttccgaaaatgtggaaacacagatttccggaaaaccctctatttttttcgtggtatcaaaaggcgtaaaaagtgccggttctgttattgtatttttttgaaaaatggttcccatagtgacactcccttcttgtcattctcatgaaaagatctaaaatcattgcataatatgcgctgtaataatcgtatagctatatgcgttgactgttattttaaggattcaacacaaaatacgaatcatactttgttccatcatgccctaccagtttttccgccgaaagctcaaaccccagatttttcaacgcttgaatacgttccgtagctgctggaattgcttttgtggcaattttactacaatggaataaacgatatgcaggcgcgataatcaaacttaatatttttataatcttatcagacatttcatagtcgctccgaatatcaagcctaagcaatccacaatctgtaaaataatctgcggcatctctgtgaaaaagttctattgtccctattgcttcatgcgtttcttttgatataatcgtccaccggacaaatccctgtcgattatactcaaaaagccaataatcaatagcctgctgcattctgttttcagttgtataataaaaatcatctccgccacaattatcactattaaagaaagagacaacctctttatctgaataaacttttagtaaatccagtctatcctcctgtctgaccattctcaaaatatagtcattattctcaaattcaggacaacttctataaatctcttccatactggtcttcctccgtaaattccgattgagatttcacctgttttaggaaatttaataactgttatattttgttattaaattcactgtaaacctttgaaaacgctggatttgtcgcaggtgagctttcccttattgtttcccttgtgttatatcttcccatataagtttacgaactctgataagggaaaatacaagggcaaaaaaaatctgataacacattataacataaaatgaaaatgacatggtgaactgattgaaatgcttctatatttttattgatttgaaggagacacaacatgaataccatttacgcaaaatacaacatgtatcacaacagcattgacatttatacatctgccggatatatgttacgcattgactgtaataaggcagaggatggactaaaagccactccccgctcacagtattcgttatatgcacttgctgctttccaatggggcagtggaatcaataatctgtcttccgattactttttcaatctctaaatagttcatagcgatatctcctcatatttactcaagaaccaataacagtgccattttgaactgctttgttgcacttactgagtgctttccaaacttatcaaacttaaaagtttctcctgcgtggatcacctgctcctgtccctcatatccaatcacagcctctccatcaagtgccatcacaagggcttctcccggagctgcatgctctgaaagacctgttcctgcatcaaaactcataacaacaaatttcatcttgtcattatgcgccaaatccatatttacaatctttccttcctgatatggaagtaactctgctaacttaaatacttctcccgccttgattacctcgttcataatagtctcctttcgaaattcaatctctttatatatagaatcttttattgcactaactccaaccgaccgttgaataggtgttagaatactttctccaggcaaaaaattgatatccctgtgccattctcatgatagatttgcttcgagatggtacaccctggcactgttctgttttctcttacaaaatctataatttttccagcttgttctttcatcgtttccacctctctttctcttctttacatctattattttatccataggcctcttgtttttctgttgctgtagcaacaatatcgatgatatgataaaatttcatttgaaaggatggtaataagcatatgaagaaactagatgattatcagaagtatcttccgatactatcgaaagcaaagctatttgaaggaattcctcttgaacactatccgcaaattttcaacttcctccaggcctcaattctctcttttgaaaaagacgaattaattcaacacctaggagaacctttgttatattccggaattgtgcttgatggaacagttgaaggatcatttatcaatgaaaactacagcaaaatcaatatgaatcattttgaacgtggtcgatcatttgcagaagccctggcatgcgtgcaaacaccatacagtccaatacagctaaaagcattgactaactgcaccattatgttaattaatcttaaaggtattataagcggttcttcctgtccatgctcttaccaactgaatttaaccactaacatgctcaaaatacttgcctcacaaaatgttttttcaaatctaaaactaagaattgcaaatcagaaatctttaagagatcgaattctaatctatttgcatagtttagcgccagatgaatattcctgtgcggcaacaccgcaaatccggcagacgggaaaccgtctgtccgggcttgcggaaaccgcttatgcgagtttactcgcgcaatgttttgtctaaaccatagacctcacgcattgagatgtcatgttcggcatcaatgcttgtgatgttgatacgataactgtcatgggcaatgcggtcaatgattgcatctgccagaggactgtcatcaccgccgagctgatcataccattcctcaaattcatactgggagcagaaaatcgtcgaagatttcttgcgtctccggtggagcagttcgaagatatccctttgttctgaatccgttggtttcaatagaagccattcatccaaaatcaggacaacaggattggcatacttagccattacttttttgtagttgccatctgtccgtgcaatctccaagtcaataagcagatcaggaaggcggacatacttggtattgaaatactgcttacaagcctccatgccaaaggcacaggccatgtaagttttaccacagcctgtagcaccggtaataaaaagattccggtgtgcagatatatattcgcaagttgcaagtctacgaatcagttccttgttcagcttgcgtccggaagtgtagttaatatccatgatatttgcttccggctggtcgaatccagcattcttaatcagccttttgagacgattatttttccgactgctgtattcgatatccaccagcataccgaattgatcctcaaatggaatctccctgcattttggatcatccagctggttacggaatgcatctgccatagctgtcaggcgcatttcaattaatttatctattgtactctgatttgtcatatgtgtttacctccgatagtaatcggcacctcttgtgatgccgtgtgctttatgtgtggtcttggattcagtagcttctgattccagttttacagaaccagttacaaggatgtttttaatactcttgtaactgggtgaggatgtataggataaagcctttttacaggctgcttcaagtaatgtatctgagtatttctcagcaagcttcagaagtcccatacaacttcggtaggtctgttgttccacacgtttggaggtcagtattgcattgaccacagtgtacgtatttatgccaatccgctcagcccatttgcggaaccggtcgccgttccattccagatatttctggtggtcttccggcatatgttccgtgaccgtgctgtactgcccagggcgtcctttcagacgacggtgggaagcaatgcggttatggttgtagaaaatttcaatagtggtatctgttacctttacatcaactttctttttgatgtattcataaggaactgagtatagcattccgtccacagatatgtgataattaaattggacggtggctgttttccagtcactcagttcaaaacgggtagcaggtaatggtgccagtaatggtttttcttcctcaagaaataagcttcgccgactgccctctttcttctgaaagagcctttggttgaacagttcgagcttgtctctgattgcgcgatttaattctgcaagagagaagaactgttcattccgaagtgctgctgtaatccaagtagagatatttcctactgttccctcagcattcggcttatccttgggagctctgacacgagacggaataatagctgtgccatagtgttcagctagttcctgataggtttcattgatctgctggtctttccatcctccattgtgaacaactgccgttttgcagttatccggtacaagaatcttggcaacaccgccaaagtactcgtacatatggacatgtgcattaatccatgatttctgcttcatgtccagaaatgcttccacgtatgcatactggctgtaagtcattacaccaacaaatatatatgccttgatgatttcgccggtatccggatcaatgattgttgcaggatcacctgcccaatcaacttcaacctgttcactgggtttacggttgatatgcatggtagcacgatgtttctgctcatcctgttggatgtggtagcagaattgtgaatacatgagtggttcatcgccattggcacggcaatcctccatgtattccgtccaaaggagctttttgcttacgccgttacggagcagctccttacggatgtagtcgtagtcaggcatacgcttgtgggatgtgacttgttttgcagaagggaagaacttttctgcaagaacagcatcggtgtcgttttcctcaagcggccaggatatacctaattcagcagcacgctttaacacacgattgactgtcttttttgagacattgcaactgtcggcaatgttttgttgactgagattcaagcttttgagcctaagaatctctcgatatttggtcatagtcaagacctcctagaatatatttgcaccacggggtgcatagttacattctaagaatttatgataaaggtttccaccaccggaatggcggtttccttaaaaacggatttgcggtttcctgagtccggacagcatggacacggaagccggattattcaccagactcagaagggtatctccatgttccctttacacagacagcacttgcagaattcttaggtgtaaaccgaagtgcactgtccagagaacttggtcgtatgcaagatgaaaatcttatagaagttaacgataaaaaaatgaaacttttactatagaaaaaaggggatgcgcccatcccctttgccaaatacgctgtatgcgatttcacaacaattttattccaatgcctcttccagcactgatttcagtgtttcagctgatttgtgtaatgccttgatttcatcttcagatagtgaaatgggaacctttgatataaatccttctgcacctacaatacttggcatagacagaactacatccttgattccgtattctccatccatcattgttgaaatttgaagtatcgaacgttcatctctgattatagcttcacatattctctttaccgacattgctattccataataagtagcacccttcctttgaataatttcataggcgctgttttttactttctccgcaatttctgacgtagctccttcatggtcatgatgccctctcatctcgcagaaatcatggagtggaatacctgacacgttggcacttgaccaagcggcaatctcactgtctccatgttctccaacaataaacgcatgaacacttcgactatctacttccagatgctccccgagacgttcttttagtcttgctgtatccagaaccgttcctgatccaatcacacgattcggtgcatatccttgccctccttattgttcaaaatgctcttttgcaaactgcatatcctgtactacttcaaccgttccaagataattgcctttcttatctcttactgccatatatgttacaaggaatggttttccattcttctccatccaaactggaactctgtcacgcttattatttctaaaatcatctaaaattgctcgcaccatcgcttctatcttaggtggatggcaagaaaatacttccctgtcaatcgccatctgagggcgtttgaacacctttggtccttcgttgaagaagcgattgatattattatcatccacaaatgtaatctcgataggcaatgtattgagaagtgcttccagctgtggaactgtcatatgaccaccacctaatatgatttctccatcgcttagagccgcctctgttcttgcttttttatcagcactatatttttctgcctcatcccagatcatttctactccaaatacaggtgcatagtccttagcatcctcgtaaatgccataccactcttccctgctgaaattcactgcgcagatagggtataaaatattattttctttatagatcatctcatctgctcgtttgagaactgtctgaagtcggttcatccattcttcatcataatctgatattttatcaagtgcagctagctcatcacgaatttcatcatccactgtccacatcacatccgaaggtcctgagatctcatagcgtacctttaataccggatagacaagatctcctttttctgcataatgaatagaaatctgtcgaagctcagatagcttctctcctacatcattcccagactcaatatctccttgaatttcatgaatcaatgcggctatcttctcgttttcaagagcccatcgatacatcggatgtccaacagtttctctaagagtctttgctgcagcatgcttctgattgtatgcatccggcatcagtttcttagatgtctcctctttcttaagtgactcttctactgctttttctgcatttgcaatcttttcttcctttgttgcaccgtgaaataaggcactgtgaacatcgcacaatttctgcacttctgtgattggtgtgccttccttaattagctcctgctcagctttcataatttcagatgcctctacctctgaaaaattctctacgaagtctttgcgcacactctctaagtcttcgccttctccaagtcgctttaaatagctctttatcttttctcttgtattttcctgaaaagccccatcttcactgctggtctcgtctcctgcattattctttccaagtgcaaagatatttggcatcttcccaataagttcaaacccattactcataagtgccggcacaaccttcatcatggatatgtttctcatcttagctccctttggaattgttgtgatgcgtcccacagagttaagcattgcaggctttgtaatctctgaaaatcctaaatcctttaaaacatctacaagctcaggatattcctgaaccaattcaaatactggtttgtttaagtctaatttctttgccatataaacatccacacctttctatctttccttgttacaaaatagaataacctaaattccctaaaataatctgttgctccagcaacatttctcaatgtctctgttgtgtgtccagcacctccgacaataatatttttctttgccacttcgttctgaatggcttcagcaagaatatcaccaccagctataatgcttcctccaaataaaaccattacatcagcctgattgattccaatttttttctaatacattttgtgtaaatccttctatatcacgcttgccacaaaattctcccaaaatattaattgcttttgctttttacataactcacctcataaaattccgattttttacttttgggaacatagttgattgagcaataaactgctacattataattacttccatatacaattaaagcattcatatgcaatttgctccattcattacattttaacaatttttcttactgtatttgccgtccggatcgtaattctgtcactgatctttgaactggcagtttttgaccaccaatttgttttttgataatctttgcggctaaaagaccagaaaatcacatttttataatgatagattttttcgtactcttcttttggatttccaacttcattataaaaactgtcataagatatgtccggaaacataaaaataagattatcatagatctccttgttgctgtctccccaccattctggagcatttttcaatatgtcttccaactcttcctgcgaaacaacaaaaacgggaatgtccaacccaaatcgtttatttatcatggatcttatttcatttgaaagtctctctttgtcatcaatgtccgcgcagaaaacaacattgccgctattaagatatgtagaaactgctgtatatccaagttctgcaaaacccgcttttaattcagacatcgctattttgtttttgccactgatattgattcctcttaataaggcaacataccttttcatacaaccattcctctctgacattttttgttttctcaatatattgtataaattttatcatatcacagactttttgtgtagtgatttctttttgatccttttttgttccttaagagaaagctcctttcagttcttaactcaatttgaaatctgataatcataaataaagaaattcattactgcttgctgtcctttgatgttaaatacgtgtttcttttctaagcgtcttttcattccttggtgttcataaaaaccataattacaacttgtgtctgtaaacaaataaaattctttcagcttttcctgcttcatgtaattgagtgctgattgaaaaagcatttttccaatcccttttcctctgcacgaagaacttacggcaaataaggcaagttctgccggataagtcttgttattttcgtttagtaattgcttatctattccattgacgttaccaaagatttttgaaacatttcgcccctcttgtgaactgtataatgatagtattgattttatctgcagcagtctgtttgaaagaggacatttatgtttagtaatattattcgccagtataatacctgccacatttccgtcaactaccgctactcttgaaaaagtatagtttgttaagcaactgcttagaaatacccttgctaatttgaccgctgtttttgaggtactaaaatcatcataatgccaagtttctctgatgatagtttctaaagctttaaaatcttgtttttgatattctcgtaattctatttgcattgttcttctccttgttttcatgatttatatcatgtatgataaagtatacagtaactgtaatgtcaataaggagatatacgaaaatgagaaaagaaattaaaaggctaacaaccgcacaattcgcaaaactacacgaagtaaataaacgtacattacattattatgatgaaatcggtcttttccgtccgcttaccaaggctgaaaatggatatcgctattatgatatttcacaaagcatagattttgaatatattcgtatgctgaaagaattaaatatgagtattgaagaaattgaagcatatcgaaaaaatcctacacctgccaacttcttaaaaattgtgaatgagaaagaaaaagaaattgataagcaaattcaaaagctgaaagatattaaaactgtaatgcaaaggaagaaagcgaaaatcgctttttgtgaaactttgcaagagcaggaaatcagaattgaagaatgcaaatcagaaaggcttttagtctatccttatgatttctcaaaagatgatatatcagaaattttttcccacttgaaagatatatggggaatcgaacaaatacgcatgggaatgggaagttttatttcgcttgataatgtatataagatgaactttgataaatatgaggggatatatacgattgccttgaacaggaagtctgttccaaatagtcttataaaaccaaaaggaaaatatctttgtggttatcaaaagggtacatgggataaattgccagcactgtatcaacagatgttggattatgccaataaaaataatttacaacttactggctacgcttacgaagttggtttgaacgattttgtaatttctgatgaagccgattatattacaaaaattatgattaagattcaagaaatctcttgattttgcaggtggtaaaatataacaaaaactccccgatcggggagttttacatgataaatcctattctgcagtctgtctcggaataataatctttctcggacatttttctgcacacacaccacagtttgtacatttgtctgcatcaatatgagccagaccgttcaacacagtgatcgcaccggcttcacagcttctctcacaaagcttacatccgatacagcccactttgcagacgctcatcaatgcctttcccttatcatgggagctgcactgcacgaatgtcttctgcttatatggaatcagctcgatcagctttttcggacaggcttcgatgcattttccacatgctttacatgcttctttgtctacaaccgcaatcccgttctccacgtgaatggcatcaaacggacaggccttcacacagcttccgaatccaagacatccataagaacatcctttttgtcctccgtcctgcatcagattcgccatcgtacagtctttaattccgtaatattcatatacatttgatgcattctcgcaggttccggcacatttcacaaatgcaacctttcgttcctgacttcctgcgctctgtcccatgattgctccgatcttctcagcgacaggtgcgcctccgaccggacatccgccaacttcggcttctccctttacgattgcagctgcaagaccggaacagcctgcatatccacagccaccgcagttatttcccggaagctctgccagaatggcttcttctctttcatctacttctactgcaaactttttgctggatactccaagaaagacgccgataaacagtccggttcctccgacaatcgccgcagcgatcaaaattcctgatatcatctcttatgtcctccttaaatcaatcccgagaatccgaaaaacgcaatcgccatcaatccggctgttaccagcacgatcggagttccctgaaaggattccggaacatcattgtactcgattttttcacggattccagccatcagtacgattgcaatcaggaatccgactgctgttgcaactccgttgacaacgcccgcaccaatgctataggatttctgcacatttgtcagtgcaactccgagtaccgcacagttggttgtaatcagaggcaggtaaactcccagcgcctgatacagcggcggcattgcttttttcagaaacatttctacaaactgcaccagtgccgcaataacaaggataaacacaatcgtctgcagatattcgaaatgcagcggcactaaaataaactggtagatcagccccgttacaaacgaagaaatcgtgataacaaagacaacggctcctcccataccggctgctgtttttacattttttgatactccaaggaatggacagattccaaggaactggctcagtacaacgttgtttacaagcgctgaaccaactgcgatcaataataattctttcatcgtccgctcctcctactcgtttgttccggtgctgccacaccctgcacaggacgcgcatcctccggcacatccgtcattattgtttaccggttttccttttttctgtgcacggttcttaatcttgttctgcaatgctgtcagacccgcaagaacaaaaaatgcacccggtgccagaataaagatcgtaatcggctcatatgtatccggaagtacctggaaattaaagatttttccggaaccgatcagctctctgacaattccgatggaagtcaggccgactgtaaatccaagtcccattccgattccgtcaaaaacagacggcagtaccggatttttggatgcataactctcggctcttcccagaatgatacagtttactacgatcagaggaatataaagtcccagtgaatcatacagacttggaacaaacccttccagcaaaaactgtacgatcgttacaaaagatgccacaacaacgataaatgcaggcatacgtacggaatccggaatgatcttacgcagcatggagatcagcatattggacagcaccagtactacggttgtagaaagtcccataccgattccgttgattgcagaagtcgtcaccgcaagcgtcggacacattccgagcatcagaacaaaggttggattttctttgatcagaccattgtaaagtctctctgtacatctattcattgatcatgcctcctaactcattctggaaagtattctgaaaatataccagcgcggaatcgactgcattggtcacagcgttggtcgtgatcgttgcaccactgatggcgtcaatcttgtcgtcacccttctcgccgtttttcgtataggtaaatttctctacatttttatctttgaactgatctttaaactcgctctcatctgctttcattccaagacctgcggtctcactgatcgagagcatctccacaccttttacagttccgtcatttaaaattccgacagataaactcaaatctccggcatatgcctcatgagaagttacagagatcacatatccgatcacactgccgttgttatccattgcctgcgctacttctgtgatatctgcgtcatatcctgcatcctgaaggatagaagcagctgcctgttcgtcaaaatctgcatatgcttcgaaggaatccgcctccggaagcactttctggtatgctgcctgtttatccgcttctttcgcttttgcgatcggcgcttttgtcacctcatagaccagtcccagaagacatcctgccacaagggtgatcactgtcaggatacatgtatttttgatcatcttattcattagcgttcccctccttttccgaatggtcttggaagagtgatcttttcgatcagcggtaccaaaaggttactgatgataatcgcataggaaacaccctctgcagaacctccgaacaaacggaagattccggtcagaagtccaagacagactccgtatacaatctgtccggtctttgtgatcggagaagtcacataatcggttgccataaaccatgctcccagcatcagtccgcctccgcagagatgagcggtaatgtactgcggatcaaagccatgaccgccgaacagagtgataaagattacaaatgttacgatataagttcccggaatccgaagatcgatcacgcccatcaggatcaagaacatggcaccgatcataatcgcgatcacagaagtctctccgattgttccgcggatatttcccatcatcatatcaaacgtattcacagcctcaccggctcttaaatttgccagcggtgtcggtcctgtcactccatcatatacaaagtacgtcattttccctgtaaacgagattaaaagaaaacaacgcgctcccagtgccgggttcataaaattctgtccaagaccgccgaacagctgctttacaacgatgatcgcaaacacagagccaagtgctcccatccagagcggcaatgtaggcggaaggttcaaggccagtaacagacctgtcacaaccgcactgaaatcctgaattgtcacaggtttgtgcatcagtttctcataaatatattctgcgagtactgcggaagctgtagtcaccagaaccagaagccacgcattctcatatctgaaattataaataccaaaaaaagtcgcaggaagcagcgcaatcactacaaaaagcatgatattgctgctcttcactcgatcccttatatgcggggaaggagatacattgaagtttgcactcacgattttgtcctcactttcttactttcttttgtttgccagtgcaatctttctcatagaaccgatcgcctgtttcagatttctttttgccggacagacaaaactgcaggaaccacattccacacattccagtccgttcatcttcacaaatccttcttcgttgtgacgctctgaaagatctgccagtctggaaggaataatcctgctcggacagacttccacacaacgtccgcagttgatgcaggcagtctcttttgcttctgctgcctcatccttttgaaacgccagaatcgaagaagatgtctttgtcaccggcgcatccagtgtgaccatggcaaatcccatcatcggacctcctgagatcagtttctgaggttctgttataaatcctccggcggcatccaccagttctctgtggttcattccgatcggaactctaaagtttcccggattctgaatatcatcaccactgactgtgactacacgctccatcagaggctttccaaaacgtaccgcctgattgatcgcgatcagagtctccacattatctactatacatcctgcatctgccggcaacattgctgcatgaatggcacgctttgtcgtggcatagatcaactgacgctctgcgccctgcggatatttcgtctccagtactttcacgctcatacgggattttccggcaatcgcctcttttaatttctctacgcagtcttttttattgtcctccactgcaaaaattccttctgcattcgggaataaagacagcaccacttccattccgctgacaatctcctttgtacattccagcatacgacggtaatctgctgtaatatacggctcacattccgcaccgttcgcaatgatgtactcaatcttatcggcttcctttggagaaagctttacctttgtcgggaatcctgcaccacccattcccacaacaccggcttcactgattctctcgataatttcttcttttgtgagttcttttagagaagtaatcggagtgtattccacttcctcatatgtaccatcgttttccagtacgatacaattcaccttacttcccgccggattgtatctcatttcgattgcttttacagttcctgccacggatgcgtaaaccggcgcagatacaaatcctcctgcttccgcaatcttctgtccttttaagacatggtcgccttttttcaccaatggaactgcaggcgcaccgatatgctgagacagcggatacaccagttcacccagaggcaagagctctttgatcggctgatctttagcaagcgcttttccgtcttttgggtggattccacctttaaatgttaaaagtcccatctaattttccttcctttcttttgctgcactagattttattatagcaaaaagttcctcgcaaaaaagaggcgaagctattaaactccacctctctatgtgtttcattctactcttctgtttcttcaacagtgtctggctcaagtgctttcatgctcaggctgatcttcttctctgcttcgttcagatctaccacttttgcagtgatttcctgtccaatagaaagaacatcagatggtttttctacatgtgctcttgaaatctgagaaacatgcagtaatgcatctactccaggtgccagttcaacgaatgcaccaaaatctgtcatacgtgcaacttttcctgtaacctcagaaccaactgcgaagtcttcagcagcgtgtgcccatggatttgtctcagggaattttaagctcagtgcgatctttgtatcgttgatgtctttcacaagaacttttatctgatctccaacctggaataccttcttcggattctcaactcttccccatgacatttcagaaatgtgaagaagtccgtctactccgccaaggtcgataaatgcaccgaaatctgttacgttcttaacagttccttctactgtatctccaacctgcagttttgcaaacagttctttctgtttttctgctctctctgctacaagaagctgtcttctgtcaccgatcacgcggtttcttcttgggttgaattcgctgatcacaaactcaatctcctgtccttcgtatttgctcagatctttttcataagaatctgatacgagacttgccggaataaatacacgtgcaccttctacagttgcgcacagtcctccgccaaggatctgagttactgttgcttttaaaacttctttgttctcgaatgcttcgcgcagtctttcgtttcctttttctgctgcgagtctcttatatgtcagtaacacctgaccttctccatcattgactttcaatacttttacagtcatagaatcaccaacagaaacaactgttgtcaggtccagagactgatcgttggagtattcactctttgtgatgataccgtctgctttgtatccgatattcaggatgatctcatctggtttcacatcaattacagttccctctactacctctccgttgtgaattgttttaaatgattcttctaacatttgttcaaaagataattctgacattattttgaacctcctcaattatattattgggcgtggatgcccctgctgtaatacctactgtttccactgaccctaattgattcaaatccaaatcgtcaagtgtctgtatatagtacgtatccttacatgctcccttgcatatttcaaataacttctgggtattggaactatgtttgtcaccaatcactatcatagcatccacctcttccgcaatgctcctggcttccgtctgacgttccctggtcgcaccgcagattgtatttaaaacacttacatcataactctttttcgaaataatttcaactaaatcttgaaatttattgtaattaaatgtcgtttgggcgacaacacatacggctcttgccggatccagtacaagggaagcggcatcttcttttgtttccaccacaaaaacctgttctcctgcccagccgcggattccttccacctccggatgcttcggattcccgataatgacgatctgttttccggctgcactttcccggtttacgatgcgatggatcttcttcacaaacggacaggttgcatccacgatctgaatcttctttttctccagcttctcgtagatgtattttgctactccatgagaacggataatgaccgttccctctgtaagctgttccagctcctgctccgtacgaaggacgatcacgccctgattttccagatcttttacgacttcttcattgtgaatgatcggtccgtaagtgtagattggtgctgcatccgaattttttgcctgctcataaactgtttctaccgcccgttttacgccgaagcaaaaaccggcagtctttgcacgttttacattcatcctctgcccccatcatttatttgcactgtctgcagatggcatgaaccacttcctcgatgctcatgtcagaactgtctatcaaaatcgcatcctctgcctgctttaaaggcgcagtttcacggctcatgtcacgctcatcccgcttctttatatcttcagcaatctcctcatagctgcaggaaatccctttttctgtcagttctttgtaccgtcggtctgcccttgtttttacactggccgtcagatagatcttgacatctgcatttgggaggatattggttccgatatctcttccgtccatgatcacatccgcttctttggccaggtttctctgcagatccagaagccttgcacgtacctcccgaactgcagaactgacagaagccatatttccgactgcttcctcgcggagtctgtctgtgacattggatccgtttaaataaacctgctggatcccgtcctcataacagatgctcacatccgcattttgtgccgcaagacggattttttctgtatcctgcggggaaatcccttcctgcagaaaataaaccgccattgcccggtacatcgctccggtatctacgtaaatatatcctttttcttttgcgaccagcttcgcaatggtacttttccctgctcctgccggtccgtcaatcgccacattatatcccatattgcttctccttttctttcctgctctattcgttaaggaatggaaattcccgcaagatatgccgtagaccaggcaatctgcagattaaatccgcctgtcagtgcgtccaggtccagaacttctcccacaaaatacagtccggaaatcttttttgactccatcgttcccggatcgatctctttgacatttactccgccttttgtgatgatcgcctctttgtagctgcgaagtccgcttaaagtcatctcaaaatgtttgatcagatgtacgaatcgctgtctctcttctcttgaaatctcattgactttcttctcttccgaaatgccggaaagctccagcatcactggttttaatttggatgggaacaaatgatccaccgcatttttaaactgtttgtttttatgctcctcaaattcgcgaagcacacgggcatccagctgttctgccgtcaaagcaggcttcagatcgatcaccagacgcagttctttttcagaaagccgctttccgatcacgctgctggcacttagcatcagtggtccgctgactccgtaatgggtaaaaagcatctcaccgaaatcttcatacagcttcttctttccatcatagaccgctgcgcttacattgcgaagagagagcccctgcagttcctttgcataccattccctgacttccatcggaaccagagccggataaagttttgtaatctgatgtccgttttcttttgcgaaccggtatccgtcgccggtagatccggtcgccgggtaagagattcctccggttgcaacaatacaggcatctcctgtctttctctgtccgccttttaagacgattgcctggaacttcccgtcttttccctctatcttttccacttctgtttccagacagatgcggacacccagagtctccagttttcgcttcagtcccgcgatcacatcggaagaatggtcagataacggaaacacacgattgccccgttctatttttgttctgacaccaagctcttcaaaaaaatcaatcacctgatcatttgtaaaagtgtaaaaactgctgtataaaaactttggattgctcatcacggaagcaaacagggtttccatgtcccctgcattcgtaatattgcagcgtcccttcccggtgataaataattttcttcccagacggtcatttttctcatacagccacacttcatgaccgttttctccggcagcgactgcagccatcattccagccgcgccgcccccgattatcagcactttactcatctttattctcctcgctttttccagaagaagactctgtcagcgtatcatccacctgattcaattcatctttactgtatacctgatattcgccccagatctgctccagtgtttccagtgtattgactacttctttctgctttttcatacagagagccaccaccagcgcattgatcacactcaaaggggccaccagcgaatccacgatcgaagccatgtcacttctggcgatcagattacaggaagaatacagattcataggtgagtgcacactgtctgtcagtgtgatcacctttgctttccggttgctcgcaaactccagcgctttgagcgtgcgcatagaatatctcgggaaactgattccaatgatcacatcctcttcgttgatccggatcagctgttcaaaaatctcactggaactgttggtgttgacagcagtaacattttcacataccagattcagataaaagcataaaaaggaggccagcggtgcgcagctgcggattccgactacgtaaattcgctttgcacttaaaatggtgtcaatggcaagttcaaatgctttctgatcgatccctgccagcgtcagcttgattttttcgatatcagactgcagcactgtctccaggatctccgactgactgatccgcccataggtaacctccatcctctgaatggaattcaatttgttgcgcaccagttcttccagtgctttctggaaaccgggatatcctttgtatccaagctgtgtggcaaaacgtacaactgtggattcactgactcctaccacttctccgagacgggctgctgtcagaaatacagccttatcatagttttccgtcacataatccgcaagccgtttctggcctttactcatttttttgtatttttcttccatgcggatcaataattcgtttgtactattttcactcacacttcatttcctcttcttcctctttgtttttcattctgctattttacaggacgggtgtattccttcagccattctttctcttctgcttccagatatggactgatcttctcatatacgctctgatgatatgcattgagcagctgcttttcttcctctgtcatcaattccggacgcaacgcatccagatcgatcggaacaaaggtaagcggctcaaaatacaaaaactgtccatattcgttcttttctcctgcacacacaagcagttcattttcaatgcggattccatgggaaccttctatataaattcccggctcgtctgtgatcaccattcccggctcaatctcgcacatggcatcccttgttgccttccagcggaatccgatcggagcctcgtgaatatttccaagatatcccacgccatgtccggttccatgattatagtttaagtttctgcgccagaatggttctctggctgcataatccagaaccatgccgctgcatccggcaagaaactttgcatcagcaagacgcagcatactgcaggctaccattgtaaaatctcccttctgtttttcatcaacctctccgattgccacggtacgtgtgatatctgtggatccatcataataatttccaccggtatctgtcaaaaacagcccgccctttgtcaattctacgtttgtctccggagaagaggaataatgtacaattgccgcatgttctccataggcacagatcggatcaaagctcggccagagatatccttcctgctcttttctgaagttctccagcttctcagatgcgctcagctctgtaatcgtctctttgccagcatgcttcttcagccagtacataaattttgtatgcgccacgccgtctttgatgtgacctcttctgatattctcgatctcagctgcatttttcacgcacttcatcagcacttccggattttcttcctttacaatacggacagcttccggaatattgcgatacaatgcataattcactctctgtggatccagaagaattgaagccccctccggaagagattttacatcttcatagattgcattgtatggatgcagatgtacctgacactcctcaaaatgctttaagatattctcatcaaactttctttcatctgcatataattccacagaatccatggtgatcagcgcataagaaagcagaagcggaaaatactccacatcctgtccgcgcacattcagcagccagtcaatatcatccaggctggtcagaagatgatagcctgtattttctttctccattctctctctgactcgttttagtttcgatgccgtagattctcctgtacaggtctcttccagataaaatgccggtttttcagacagagccggtctctcttcccagatctcatcaaccagatcacagccatagtacacctgtccgtgcttctctttcgcgatctcttcgtactgttctccttctgtaatcccgatggttcttccgtcaaatccgatattttcagattctcccagtacagattcgatatattctgcgatcgtaggcactcccggttctcccatcttctgcagacggatcccgcttccctgaagctggctttctgcctgaaggaaatatcttccgtccgtccagagacagctttcttcttttgtgatgacagcagtccctgctgatcctgtaaatcctgtgataaatgctctggatttaaagtgttctcctacatattcactctggtgataatctgctgtcggaatcatataaacagaaatatggtgttcttccattttctgacgtaatcgttctattctatctttgatacacataaaatcgtcctcctttgccacgggtaattatatcactaaaacagattctgcacaaggaattgaatttttatttcttttccggacaacaaaaaaggaccggaaaactttcatcttccagtccttttctttcattttattataccggatatgctccgtcttctgtatctgctacttttgcatctacttttgtctgctgagcatctctgtatttgaagaagtctgttgcaacctgtgggaacagtgcatatgtcagcacgtcctcatcctgctggctgtactgtgcacactcgttgcgcagtgtatccagctcgtttggaatcagatctgcaggacggcatgtgatcacttctgcatcttctccgattacttttttctgtacttccggattgaatggttttgctgtcgcaccatattttccggacagtacgtcttttgtctcttttgtcgccatcttatagcgttctcccatcagtacgttgaacactgcctgagtaccaacgatctgagaagaaggtgtaacaagcggcggctctccaaggtctttacgcacacgcggtacttcttccagaacctcgtagaatttgtcctctgctccctgttcttttaactgggatgtcaggttggaaagcattcctcccggtacctggtacagaagtgttttgatgttgacaccaaggttcttcggattgagcagtccggattcgagtgcttcgtccctgatcggtctgaagtaatcagcaatctctgcaagcaggttctgatccagtcctgtatcgtatggagttcctttgaatgtctctaccataacttctgttgccggctgagaagttccgagtgcaaatggtgacattgctgtatcgatgatgtcagctcctgcctctacagatttcaggtatgtcatagaagcaacacctgatgtgtagtgtgtatgcatctcgatcggaatctcaacggcttcttttaatgctgtcacaagctctgtagcctgatatgggcaaagaagacctgccatatccttcacacagattgaatttgctcccatgtcttcaattctctttgccagctctacccagtattccagagtataagcgtctccaagtgtataagacatcgcaacctgtgcatgcgctttttctttatttgctgctgtaactgctgtctgcaggtttctcatatcattcatacagtcaaagatacgaatgatgtcgattccgtttgcagcagatttctgtacgaaatactctaccacgtcatctgcgtatggacggtatcccagaatgttctgtccacggaataacatctgcagttttgtgttcttgaatccgtcacggaatttacgaagtctctcccatggatcttcgtgcaggaaacggagtgatgcatcaaatgtagctcctccccagcactctactgcatgatatccgactttatccattttatccacgatcggcatcatctgctctgttgtcattcttgtcgcaatcagagactgatgcgcatcacgcagaattgtttctgtaattttaattggtttttttgcaatttctgccatttttactgtcctccattattatttcacaccaaagatcgccataaatgttccggctgctaccgcagtaccgataactccggcaacgttcggtcccatcgcatgcatcagcaggaagtttgtaggatctgcttctgctccgactttctgagaaacacgagctgccataggaaccgcagacacacccgcagaaccgatcagaggatttaccttgccctttgttgcccagcacatcagtttaccgaacaatactccggctgctgtaccgaatgcaaacgcaatcagtcccagtgcaacgattttcagtgtatccatgttcaggaatgcttctgcacttgttgtagcacctacagatgtaccaagcaggattactacgatatacatcaaagcattggatgctgtctctgtcagctgtcttacaactcctgattctttgaacaggttaccaagcatcagcatacctaccagaggagctgttgtaggaagaatcgtacatactacgatcgtaacgatgatcgggaagaggattctctccagtttggaaaccggtcttaactgctccatcttgatcttacgctcttcttctgttgtaagaagcttcataatcggcggctgaatgatcggaaccagtgacatataagaatatgccgctaccgcgatcggtcctaagattgctgtctgctgtaattttcctgcaaggaaaatagaagtcggaccgtcagcaccaccgatgatagaaatcgctgcagccgctttgtcagagaatcccattgccattgctccaaggtatgcggcgaaaataccaaactgtgctgccgcacccagaaggaaactcttcgggttcgcgatcaatggtccaaagtctgtcatcgcaccgacaccaaggaatatcagagacggcaggattgaccactcatccagaacatagaaataatacagaagtccgcctgttccgttcgccgaatcttctgcatgaagcatgatatccggataaatattaaccagaagcataccaaatgcaatcggaactaacagcagcggttcaaagccgtgtctaatcgccagataaaggaaaaagcaggcaactgcgatcataatcaggtttccgaacgtcaggttcataaacgcagtctgctctaccaggttccccagcgtatttgaaatatattccatttgtcaaaacctcctagtttaatgtggctaatactgctcctgactctactgcgtcgcctactgccacatcaatgctagcaactgtaccatcttccggagctactacagggatttccattttcatagcttctactgtcacgatggtatctcctgtttttacaacctgtcctacacttgcgtcaatactgaatacttttcctgctgctcctgcttttacctggatgcttcctgctcccgctgatgctactttcggagccggtgccggagctgcctttggagccgcttttggagctgcaggtgcaaccggtgccgcacctgcacctttttcttctactgttacatcatatacatttccatttacagtaattgtataatttttcattttaaaatcctcctgattaattccatttgttccatttatttgattgtcttctcttaattgaacgaactacaaatccgtctgtagaagttccttctgccgctgcgattgctgctgagatgaccgctacaagttctgtatcatctgaaacatcttccaccactggtgccgcaactggtgccggtgccggtgtttttgccggttctgtagttttatttttcttaaatttcttctcaagttccggaataaatctgaacagagaaataatgaatgaaataaagattaaaacaaggaatacagttcccattccaaggatggtattcaaccccgcctttttcagaatctctgaagtagaataatgtgcattgatcgtcatactgtccattttctgttcttcatcaaatgtaaattcgatatctgccgtcttattctcatactctgcttctgtagaaacaacaataccagagcttgtcatctctgcctcgaagtccccataacttatgaactctccgcattccttttctcctgctttccaggattcaaccatagaaaggaagttttcagaatctacaggaagaccggtgttgagaagcatcagattcaactgcaagtctgacatttcctcatactgatcaaaaacttcatccggtgtctgactgaagctgctgacaattgcctctgaataagccatcatagactctctatcattacttgttgtcgtatctgcctcactgccgcatcctgaaacacctaaggtaagagcacaggcaagtacgattaaacttaattttttcttcacttcgcctcacctcactaaaccgtaccgtgtttctttgccggacgatcctctctctttgtgaacagcatctcaaatgctccgatcacatattttcttgtgtcggctgcatcaatgattgcatccacatatcctcttcttgccgcagaaaccggactggactgcagttctttgtattctgcagctttttcttttaatgtctgtgcatctgcgtctgcatacatgatctttgctgccatagaagcatccatcattccgatctcagctgtcggccatgcgtataccagatctgccccgatagatttgctgttcatcgcaatatatgcgcttccgtaagcttttcctacgatcacattaacctttggtacagatgcattcgcgaatgcgtaagtcagttttgcaactgcacgtgccatatccttctcagcttccagagttgcttcaaatcctgtcacgtttgtcagggataataccggaatcgagaaagcatcacagaaattgataaaatctgctgcttttttacatccgtcaactgtcagaacctgttcataggactctgcatttccttctgcatcatatactttggaacggtttgcaacagctcccactgtcattccgttcagacggataaatcctgttaccatttcttttgcatattctctcttggtttcaaagaaaatattgttgtcagaaattgtggcaagtgcaattcctgtatcttccgcagcattggcaagatctgcgcagacacggttcaggtcgtctgtacattcgtcataggatgcatcatcctcaaagtttgcagggagcatgcagatcagagaacggatctgtcctaagatctcttcttctgttcctgtcacatcgacaagccctgctgtcttgctctgatattcagcactcgctgtgtcacatttggaatcaatgtttccttccagagcatttggtgaattaacgaacaattttccttctttattttccatgaatgtgaaatccgtcagtcccggcacgactgcaagaccaccgccacacataccaaaaacagctgtgatctgagggatcacaccggatgccattgcctgtttaaagtacaggcttccaaatgcctccagcgcgtctgtcgcttcctgaagacgaagacctgcacagtcgatcagaccgatgaccggcgctcccatcttcattgccatgtcatagatgtttgcaatcttctttgcatgcatctcgccgatcgcaccttttaaaacagatgcatcctggctgtagacatagacaagatttccgtcaatcactccatagccggtaatgaccccgtcagccggagtttctttttcctgcaggttgaaatctgtatttcttgctgtaactgcaccaccgatttcaacaaagctgccctcatcaagcactgtggcaattcttctgcttgctgagttttctgttgcattgttgctcatattctagccctccatattataaaatgtgtttaaatataaaccaaaatttttgcctattctagtatatattacttagcgaaaaaattcaattaaatttctgttttttgtcatttctttgccattttcttttattttttccgaatttttttaaaaaaagacatatttcctgactttggaaatatgtctttgttttttacttctgattacggaattgcaccggagtgacctgatacatctttttaaagatccggttgaaatgttctacgttctgatatcccacagtctctgcgatactctccacagttgcattgccttccctgagcatcgtgcaggcttttttcatccggacatttttcaggatatcgccgaatgtcattcctgatttttccttgatatatttggaaaggtatggtttcgacaggaaaaacttttcggacagctcatccagtgtcacatgcttatagtttgcatagatataattcgtgatctccaagagtcttgcatccttgcattcctgctgatttcggagttcttcgatcttattgactgccacgaccagggcttctacagaagctttgatgatatcggcatcaatgccaacaccccagtagcgttttttattgcagatcacgcccacataagcgaccgctttggatgaagacccttttgtcatggaatgttcttcataaaatgccagctcataatcgatgtcaaaatagtgcttgatggcattgctcaccgcatccagacgtccatttcccattccgttgatcacacggtcgcttcccgcatggtggatcgtcgcctccgcaaggattccgtctgcctgtttaaagtggcattcatctactgtaaagattgtttttacgtgaatataatgatcttcaaatatatggtatacccagtccggcgtcagctctttatgcgctttatctgacacatcctttacaagatagccgacctcttccctcattttctgcggaaggctgattccaaagctctgttttaaaatatagttgactccgccttttcccgactgactgttgatacggatcacatcggtctcgtagcggcgtcccacatcttttggatccagaggaaggtaaggaaccgtccacgtctggcactgcttctcttctctccatgccattccttttgcgatcgcatcctggtgagaaccggaaaacgcggtaaataccagttctccggcatatggctgtctcggagaaacctgcattctggtaagtctctcataggtctcactgatctcactcatgttggaaaaatccaagcccggatccactccctgtgaatacatattcatagcaaccgtgataatatccacatttccggtccgttcgccgtttccgaacagcgttccctcgatccggtccgctcctgccagaattccaagctctgcgtcactgacgccggatcctctgtcgttgtgcggatgaagcgataacaatacatgttctctgttatataagtgcttgctcatatattccacctgacttgcgaacacatgcggcatcgcgttttccacggttgtcggaagattgatgatcacttttcgctccctggacggctcccacactctgagaactgcattgcacacttccagcgcataatccacctcggttccctggaagctttccgggctgtactcaaacgtgaaattcccttctgtctcctttgccagctcattcagaagaatggctccgtctaccgcaatttttttgatctcttctttattctttttaaatacttgttctctctgtgcgacagaagttgaattatacagatgaatgaccgcatgcggcgctcctttgaccgcttcaaaggtccgtttgataatatgctctctcgcctgtgtcagaacctgaatcgttacatcctcaggaatcatattctgctcgatcaatgtacgcagaaactgatattctgtctcagatgctgccggaaatcccacttcgatctgcttgaagccgacatccagaagcatctggaagaattctattttttcctccagactcataggctcgatcaatgcctgattcccatcccgcagatccacgctgcaccagacgggcggtttttcaatatggtctttcttcacccagtcatagcacggcaccggcggcataaaatagcttctttcatatttttcaaaattcttcatcgcaagcactccttatattacatcaatttacttgtctttttttatttcgtttatactatcatactcttccattcgataccagtgacatttttaatcacttaccttgatttattttaatatattttctcttttaagaaatattttgctgctattttcttccagcaccatgaaaaatcaatttttcccacagacctttggattactaccggaagtctggcaagagtttctccgttgacccgatattctatcgttcccacttctgtcccttcccggacaggagccggtaatactgccggaatgttccttcttacctgaacagattcccagtctgccagcagaaacgaaagatttgactgctctgacagtgcttctgcatatgtatacgcctctttctgattggaatccggaatcccatccgtcacccggattttaaatttttgcccggcgcctttcatactctgatattcaaaatgttccagaccgtactccatcagtttttttgtatcctcccatttatagctccgattgttcggccagccgcacgccagaagtgctacgataaaggttcgcttttctctttttaatgcccccacgtagcaatatcctgcctccccggtaaatccggtttttccggatacagcgccttccatcatcgtaagaaacgcgttgtgattgatgcaggaatacgtctgcgtctgctccagatccgaaaactgataggaagacacgcctgtaatttccagaaattccttccgctttggagactccatcacacaatagcgcataatccttgccagttcttctgccgtggtccgatggctcccgccgtcatctgccccgtccagaccattgggtgtgacaaaatgggtatggctaagtcccagttctcttgctttctggttcatctcatccgcaaactgctccacgcttccagccagatgttctgccagcatcaccgctgtatcgttatgtgattccagcatcagagaatataaaagatccttaagcttaaatttctgtccttccactgtccccagtcggactctgggctgggctgccgcattggcactgactgacacactctcatccgggtctgcacgttccaatgcaagaatgcaggtcatgatcttggttgtactcgccataggacgctctgtttcggcattttttgcaaacaaaatacgcccgctgtctgcatccatcaaaactgccgaccgggcgtataactgtcctggagtattctccccgtatgcgatttttgtctgttcttcctccgcatatacacacgaaaccggaaacagaccatttactgcaatcagaagacaaaagcccaggatcagcccgacccgatatgttcgtcctctttcccttcttttctcatgcattgcttttttattctccagacattctttgctatatcctatgtccgaagatttttaatcagaactacaggtttaactttaactgtacctcatcctctgcttcttctttaaaatgtgctacctgctccggattcggcgcaggaagttcatccagagaatgtacactgaatctgcgcagaaactcttctgtggttccaaataaaagcggttttcccggcgcatccatacgccccacttcctcaaccagatcatattctaccagcttgctgactgcatgatccgatttgacgccacggattttttcgatttccagttttgtaaccggctgcttgtaggcgatgatcgaaagcgtttccaaaagtacatccgtaagaacctgttttttcggctgctttgctacccggatcaaatattcatacatctcttttttcgtgcacatctgaaacgaagcttccagttcgatgatccggattccccgatcttctttctcataccggtccatcatctggcggattattttttttgtcgtttcttcgtcatgtccgatcgcctgtgcaagttttttcagctccacagagcctcccattgcaaacaaaattgcttctatggctgcctgcagttttttttgctccattctttctctttccttcctgtttctcctggcatgctctgttatatctgggaatcgatcaggatctccccgcagatttcttcctgataaacacggatcatgcccgtcttcatcagctccagcactgccagaaatgtcaccacaatatgcatcttgcttctctgtttttcaagaagcatacgaaaactgaattttttatgtgtccttgcataagtctccacatacaaaagcttgtccggaagcggtacttcttctttctcgatcttaccgaacttactccgcaccggatcgatcttctcttcctgcctgcgcatcacttcccggaaaatcttcctcagctgtaccagcgtcacgtcccctaaaagctgatccagatctaccgcaggaacataacttttcacctctttgggaatatctgcctcccggtaaaaatactggtctgcatctacctgacgatcccgcagctcgtaggacatatatttgtacattttatactgtaaaagctgttctaccagctctgctctcggatcttcctcttcgccctcttcattgatctctttcgggagcagcatccggcatttgatatccagaagtgttgccgccatcacgagaaattcactcatgacgtttaaatcttcccgctccatctgccggatatattccatatactggctggtgatctctacgatcggaatgtcatagatatcaatcttatttttctcgatcaaatgtaacagcagatccaacggaccttcaaaaacctgcaattttaccggtatccccatctgttttatttctcccatctaccgtctgttatttcacactgtgtttcattatacgggaaatccttcaaattctcaactgtctttttcgccccgcagatgaatcacgatcatctctgcctcattcaaaaaacgaagattgatcgtatgagtgccaagcccacggcttacaatgatcgtctgctctccttctgttgtcatctccccggaatatttcggaaacggaatcgcctgaggcgtgatcagacctccgattcccggcagacggataatcccgccgtgaagatgcccggaaagcaccagatctgctccccattttttatatgcgtcaaaataaaccggattgtgcgccagaagaatctcataatccgcagcttctttttcaatacatgctgttacattctgctctgtgacccggtattttttgaattttgtataagttgcaaggggcagttccagagccgaaatccggatcctgcagtcatcctccttaagcaggacactgctattttccagaaaatgcacgccgcattcttctaattgcttttgatacgcctgataaacctccccatagacttccggttttctcttcatccgctgctcgtgatttccgcaggcataataaaccggagcgatcgcaggcagttttgaaacaaatttcagagccggagcaacggaacaccctttctttccgaccagcatatccccgccgatcagaatcagatccggcctcgctttgcagatcgcatccagcaaacgttcatttccgactccatattctttattgtgcagatcgcttaaaaacacgatcttcttttcctttttcagcccgttcagcctgcgggatacaacaccgtcctctgtcaccttgaaatactgctgctcccggtacgcttccagcagacaaagaactgccgccactgtcagaacaaagaccactaagatcactgctttcatggcattctcctttttgtcattttttcttcttatcctatcatttttttggatgcagttcaacataaggaaaggtgcagcacttcgctacaccctgattttttgcatcacttttttcagataatccaaaaattctgcttttttacagctttcttttgccagaatctccactcttccgatttctttttctcccagcttatagacaagttcgcctactttctgtccttttttcaccggagcttttacagactgcttcatctgtgtcttctttgtcacccctgccagatttgctccgcttgtgtccagatagcggaacgtatccgcatactcacagagaatctgctctttgacaccaccctgcacttcgaccggctttaacttcggcggatcattgtcttcgtatacctggcactttccgaatccgtaattcagaagcttcgtcgcatcctgaaaccgctgtttcgaattttctccgcccaggatcaccgcgatcagttccatcccgtctttttcagctgtggcagacacgcagaattttgcttcatcggtggaacctgtctttaaacctgtggcatacggatactgccgtaccagtttgttcgtgttggacaatccaaattcagaagtccccttttttgtggtgtgggtgatcgtatccatccagatcatgcagtaatcatgaatcttcggatatttttcgatcaattctctggacatcagagcaatatctcttgccgtcgtcaaatgtccctcggtatccagtccgttacagttttgaaacgttgtatttttcatgccgagccctgccgcccgttcattcatcatccttacaaaagcctcttcactgcccgctatgtactctgccatggcggtacaggcatcattggcactggctacggaaatacattttaacatcgtatccacactctgcgtttctccgggttccaaaaacacctgagaaccgcccatggacgctgcatattccgaggttgacacctcatcttccagcgcaattttcccatcctccagtgcatcaaagatcaaaagcatagtcatgatcttcgtgacactggccggcgcgcgtcttgtatctgcatctttttcatacaacacagcgcctgtggacgcttccatcaaaacggcacttggtgcctgtacttccacctctgcctcctgctgcccttctgttttctgagccgcatccggctcttctgccagagtctgaatcccgggcacaacagccacagagagactcagtactgcgcttagtaacactgcgagaacacgtttcatttcgattctccattccctgatctggtctgttactatttattatatccacttcgctttcttataataccagaaaaatgccagagaacttaaactccatgtcagcggatatacccagtacaccacctgaatgctgtgagtgagtggaatcatcacggaaaggaaagacacccggatcacacaccagcacatcatcataatgatcatggacaccatcgtcttgcccgcaccgcgcaaaattgctgcaatggaatgtgaatatgcaagcagacagtaaaataacgctgctgttctggctttttccacaccaaaccgaatgatctcaggagaagagtcaaatgccgcgatcagctgtggtgccagaagaaataccacgacaccaatcagttctgccaatataactgctgcgagaattccaaatcgcgccccttttttcgtgcgctcctcctgctttgcacccagattctgtcctacaaatgtcgtcagtgccatagtaaagctgttgatgggcagaaaaccgaacccttccacctttgtgtaggccccatagcccgccattgccatttctccgaatgcattgatattggactgtacgaccacgtttgcaaacgcaatgatagagttctgcactccggaaggcagtccgatcttgatgatctggacaaggattcctttgtcaaaacggatttttcgaatcttcaatccatagctttcctttgtccgcagcagctgccagaaacaaaggagtgcactcacaatctgagagatcacggttgcaaccgccgcacctcccactcctgtatgaaatcctgtgataaacaacagatccagaaccagattgatcacagacgatacgatcagataatacaaaggatgtctgctgtctcccacagcctgcagaattcccaccaggacattgtacatcacaaatcctaaagatcccgcaaaataaatctgaagatatgtcaccgattctctcattacactttcgggcgtatccatccaccgcaggatctgcggagaaagtgccactccgacgccggtcatcaaaactcctgccaccagaccaaatgcaactgtggtgtgtaccgcgcgctgcagatttttctcatctcctgcaccaaaaaaccgggcaacgattacccccgctcccgctgagattccactcaaaaatccaatcagcataaagatcagacttccggaggagctgactgcggccagtgcactgctccccaggaaatttccaacgatcagagaatccacggtgttatataattgctgaaataaattgcccagaaaaatcggcatcgcaaaaaaagtcatctgtttccagatcgagccgcttgtcataggcgctgctgtctttgtcataaaatcccccttgttgtttctttcttatcctatcgccttttataaaattacaaataatttttccagtccaaatttgccttcatcctgcagcatctgctccatcttgcacttgttgaaatctgaatgctccacttctcttgcataccggcgtgctgcctctgcaacatccgaaaactccagcgttccatttttcaaaaatacaccttttgccagcgcccggatcaaaatacaacctgccactgcaaattttagtttcccatatgcctgttcatcgtagactgccccgcaaaagtaagtaaatacaaaataaaccatcagctgttccatgatcttctccgtaaacacagattcgaactcttttctttgctctgctgacagctctgattccaacaacatattttttgcttctttgacatatcccttccagtcgtctctgagcacttccagatgattcaggatcacaaacagattgccgcaaacctcctgctgcgttttttcctctgtatccagattgtccagtttttcctgaaaccaggtccagacgcgttccttctcgtaacgctttagaagcccatcaatctcaaacagggcatttttgtcgatcctctcctgcagatcatgcgccagtgccagcacgattgccattctcagccggactggatactcccgattctgaagaatctgaaagatcagagttctcgcgtcttccagtttggtaaacaagaagaaatcaaactcctcataagtctcttcccgatccggattttccgcctccagaaaacggaccggctcttcgcagcccaggatcagatttgctgcttccggacaggataaagacagggaaatctcccgcagtccttcaaattcttccacatgcctcggatacagcctgcaggtcttgcagaacatcccggatccgttgccttctatgtacagatcacacagattttcttcattgagaaaggcacagcgcttctcatattggcgaaacgcgccttcctcccagtcaatttcattgtgcaggcgactgccaagccgcccttttgtctgtctgtattttttcagtgaagcgggatcgatcataatctgccaccctgcgcagcaagtatccggacagtccccgccgatacatgcaaacttcttatagtagtgcggaatgatatactgcatgttgtactccttttttatgtcactatttttcagtcgagaaacacatactgtttcaatcgttcaaacgcttctttcacacgactgtgcggcagcgccagattcatccggatatggcacgctccgtggaacggacgaccatcctgccagatcacgcccacttccatgcctgccctctgcagctcttcaatggtctggtgatgcgcctcgcaccagtctgtgcagtctaaaaagagcatgtacgtcccctgcggtctggacacggaaacacccggaaattctctcctgataaactccatggcataggaaatgttcgtatccagcacggtgcgaagctcgtccacccactccattccttctttcgaatatgccgcgatcagcgcatgcatggacaacacattcatagaattgtaatgggtcattttcccttccatacatacccggtctctcaaatacgaattataaatgatatgatacgaaccgatcaatcctgccagattaaatgtcttggacggagcgtaaagcgcaatggttctgttttttgcatcctcggacacagactgtgtcgggatatgctgatatcccggaagtgtcagatctgaccagatctcatctgagatcacatacacatcatgcttctgatagatttccattgccttttcaatctcccagcgctcccagacacgtccggtcggattgtgcggcgaacaaaaaactgccgcatggatcttgttttgcacaattttttcttccatatcttcgtaatcaatccgccagattccttcttcatccaacaccagtggattcagaacgatattccatccattgtcctcaatacaatgcgtaaatccgatatacgtcggagattgcagcaaaacagaatccccattggaacacaatactttcaaagccgaaaccacaccgccgagcacaccgttctcatagccgatgcactcttttgtcagatcgttcacaccattacgtgtcttctgccagttgatgatcccgccataatatgccgccgacggatcaaaataaccgtatgccggatgctttgtcctctggatgatcgcctccggaattgccggaagcgccggaaaattcatatccgctacccacatcgggatcagatcaaacccttcccgaattttcgcacctgcgaaaaaatcattgcctgtattgtttccggcaggcgcatctactgcgatggcatcctttccccgccggtccataatcgttgtaaaatcatactgcatgatatcaaacctcttttcctgaaatccggctccccacaaaaagggaaggatgttccaaactggaggcatccttccatccgggtgcaacgaatcttattgtttcttctattctagcaagtcaacgtgagaaaatcaacacccctctttcggtccggcaatcaccgctgtctatcgacctcttccagttcatacggctgaaacagtttgattgttccgtattctccgtcaaatcccgaaatccgctctacctcgccgtttcgcagacgctcaattccctctgcgatcagaaatccggacttttgccggatttcctccaacggcacagttctcagaatctcaaattccgatccgatcatccgcagcatctgctcgtattctttttgtaccttcttacttcgggaagaaacacccacgcatgccgagatgacttccggaagtggaaccagactttcaaatccattggcgccttcttttacaaaaccttccgccctgtccgccagctgttcaatccgatgagagacaccaatagtgatttttcttccacacaccggacatttcccctgatatgtttctgtctccatcggtgtcagacaaagattgcacttccgatgcccatccatatggtattttccttcctccgggaaaaattcaatggtgcctgccagaccgctgccattttgaatggcacctctcagaccttcataggaccagtcaatatccagaagagtggcctctcttcccagttttgccggagaatgcgcatcggaattggaaatcaactgaaaccggtccagcatggacacccgccagttcatcggcggatccgaggataatcccgtctccactgcatgaatgtgagaactcagatccccgaagcactcttccaccgtatcaaatccggaaaatgctccgaacatggaaaaatgcggtgtccagatgtgtgccggaacgtacatgccatctggtgttgtctccagcatgatttccagtaaatcccggcaatccaacccaagaatcggccgcccgtccgaatgcagatttccgatcacttccagtttctccgaaagattctctgcggcttttagcccgggaaggatcaaaagactgtgaaccttccgaaccttatcgcatttcttatagatagaactgatctctccggtgatcacgaatcggggaatcatgtgatccggcgtattcccatcctgaatcctgtattcttttttcagcacataaaatccgtcttctgcgggctttaatttttcttttaactcttctctccatgccggatgcgtaaaatccccgctcccgatcagatggatgccttttctgcgcgcccacagatccagatactccggcgtacactctttgctggtggctctggaatatctggaatgggtgtgtaagtctgcaatatacatgtctgataacctcttttctatgtctgttattcctgacttttttctctataaaaaaatataacacaatcgggcaattccgtcagcaaaattgcttgcattttccatatccaggtaatataataatttggtgcagatattcttatcggcaatcgtcagatttccgtccgggcagactgattttttcttgccatctgctttttttatgtatatttttactctctttcattctctgaaagagagattctataaatcgaaggaggttcttatgaattcccgtacttactatgatattctcggtgtttcccgggaagctacattacaggaaatcacaagtgcaaaaaatgcgcttgctaaagtatatcacccggatgccaatatgaatcagggcatcgacaccactgcgtgtatgcaggaaatactggaggcctaccgggtactttccaatcccgaatcccggcacgaatatgacaaagaattaggcggcggacaaatccgtgtcttccgcacctttaccgttggtcccgaggatgatgaacaggctgctccgtttgtcgtatattggaacgctgcctgtcgtctgcaggaaaccgtagatcttgcgatggaattttgggagaacaactcccagaagaaaaaacgtacgtttctgttcttccgccggaaagatgctgcttctgaggcagaaaaacaaaaacatctgaacaaactgtctgtgcgcgccatgcagtatatcactgtcttgaaagaagccggcatcccctcccagtactggaccgaagatgcaatgaactgggtactgatccgttggagccaccgtcagaatatggactatcgcgtactcttcaatcgttacgaaaaacatctgaatcaggatctctccaattccgaacgtcataaacttcatgtccacggaaaacaattccacaacaatctaaaaaaactgctcagctgcgctctataggcgcagcaggcagtcctgcagtaaggcttcacagccttctttcacatcttcgtatgtcctgtcaaaattcccggtataccacggatccgcaatatcctgccctgtccgctctgtaaaatcaagcagtttcgacacttttcctttcggatcgccgcccagaatccgcatcatgtttcgaatattcatagaatccatcccgatcaaataatcaaattcgtcatattcccacttttgcagctggcgtgcgcggtgatcaccgcatgaaatgccgacttcttttaatttccgccgagtgccgtgatgaatcggattaccgatctcctcgcggctggtagctgcggaatcaatgtagaactgatcggtgaggttgtgtctgttgatcaggttctggaaaacgtattgcgccatggtactgcggcagatgttgccgtggcaaataaatagtacctttattttctccattttatctcctcatatcctctcaaatccttataaatactggcttttcagcctttgtgcatttttttcttgaaaggttctttttcttataaattcatgtattttctcatgttttttcgggcatttgtggtacaaatgggttatttttaaagtcccaaattccttatgaaataaggcttacatgagttatttgtgcatgtttttgggttacaaactttttcttttccagttcatcccttgcttcttttaatctggcaagttctttctttgcatcatcatagccggtgtgcgtataaatattgagtgttacagatatatctgaatgtcccatcagatattgcagtgtctttggattcatccctgaattggccatattggtacaataagtatgcctgcatacatgaggtgtaatatttggcatctgtggtcctatgtcaagaaaaagtacaaattaaatgtaaccaattttctctgttctgagcgaagtttaacttgctatttttattgcattctcctcgacgttttcaagatattgttcctcatattcatttggagacaaatatccacaatgactgtgaatgcgcacggtattgtaaaatgtttcgatgtattcaaaaatcaatttatgtgcatgtgcataattaaagattttaaaccggttgatccattctctcttcaaaagtgcatggaaagattctatacaggcgttatcccatggatatgctttctttgaataactgtgaatcatacctttggttgctttttgaaatgcttccgatacgtactggcatcctctgccgcagtggaagatcaacggtttttcaacatttctgacacgttttgctttttcaacacattccactacgtgggaggcctccagcgtctcactcaacacccaggaaatgatttttcttgaatacagatccatcacactggtaagatacacaaatccttcaaatgtccaaatataagtaatatctgaacaccagacagcatctggataagcaggattgaattcctcgttgaggatatttttgagtttctggctgaaatcagaatctatggttgtctggatatatggtttcacccaatgggctttgattcccatttgacgcatataatttccaactgttttttcggaaacatactccccggattttcgcaattctgcagtaattttaggagcaccgtagttttgatgggattcctcgtagatcttttgaattttttcttttaaaactgcacggcgaacagacgtgtccgaaggaacccgtttcttccatgcattgtaacccgaacgtgaaacgcctaattttttcagtattccgctgacagaaacctgacgtttcacgggcagggatttgatttctttcacgtactcagaagtagccgtgtaaagagcttttgtcagtttcccagaataccgattgctttttttaacacttcaagagcatcctgcgtatctcgtaattcacgctgcaatctggcaatctcttttgcttcctcacttgcataatttccagaaccacgggtaggaacctctcctttatgttcctttgctgctttcatccagtttttcagtgcagattcgctgactccaagattctccgcagctttgcgaagtggcagctccggatgatccaagcgatactgtactgcatcctctttaaactgttgggaatattttgtaccttttgccataaccattctcctccttgatctatgactatcatatactatttatcgaaaatggtcatgtttattttgtactatttatattctaacatcaatgttctttctttggttcctgtggttacagtcttgttaagcaaggaagaatactttgttatttaaattctgtatacttttctttactcccaaaggctttctctactggatatttctcattgttctttttaactttgtcacgaacaatttcatctaagtccaatccgcaagtatcagccattagaatacaatagttaactacatcagctaactcttcctttattttatccaactttttttcacaaaccacatctcctgcactccactggaatacttcaagcaattctgctgcttccagactaatagaaatagccaaatctttgggattatgaaactgtttccaatctctatcatctctgaactctaatacctcattaatcgtttcttgtgtcattttgatatacctcttctccccttattctacatctacatatcgtgaaatataatctctaagattcggatcgcttacatataaatatgttcctcgaattcctcttgtcataagaacataataaatatgttgtatatactctttaagttcttcatattctgctgtctttttaccattttgatcgaaataattttccgcacgaattataatatttttttcatccggatcatatcctatttcatccccaagaataataaacgcataatttaagtcatacccctgtatagaatggatacacccgacctcatcaattgcattttctgaatgaacccaaccttctgtacaatgattccattgtttctttatttcctgaatctcaatatcataaacagttttatcatttttactaagccagtcccatgcatatccagctgccattctcaccaggcctacttctttttccttctggtacatcaaattattgaacttcgtaaagtcagtcattaatattaaattgtaatttgcaaaacttttcttcgacttcacttcgccggataaaatttcttttacataagcaatataatcatttccaccttttacacgcatctgtgtttgtaagctgtaataagtaagcatacgttttgcttgttctattttcattttactaccaaaccgtttcacatcaattcctgatggaccaacaatctgcatttcatcatagaaaagtacaggacatttacattgatgaagtatccaatctaactcatcactttccgttgttagaccaattcttttgcaacttgctttaaacgctcccatatatgaaatatttttatactgatgcaatctatgtgcttcatctacaagcaaaatatcataatactgttttgtcacatcagaaggcgacaaaacatcagacgccttaagtccataaatactcttaaaaatgccttttaacgtctttctcaaggaagtctgtggcaccacaaaaccaatctttttatccttaaattcttcactgtctctcaaatatttcaatagaaaaattgcaacgattgtctttccacttccaggcataccatttacaactacagtttgattttcttcttgttttaaggaatcaacaatttcttctactgctgttctttgatcattattcagttctttaaatggtgaatatttaaataaatctgaattttcaagttcttctaaagaatgcttcactaacttttcacgctgcaagctgcgccaaagaacctggaatttctcatcatattctttttttccataatattctttgtctgccattccagcatttttgttgcgcacttcataaagctcatcggccacaatatactgaatcagctttgactcataatcaaatgtaacagactgattaaatttagaagaataaataaaatgtactttatcgaaaattcgcttatctacagaactgtgatgctgggacatacgatttttcacatgatttgactctccaatataagcttgctttccattttccaaaatataaagcattggccaattagacaaataactttcgtccccatatgtttgatttttaaagtcaccttctgtaattttaaacatgttaatcttccttcaaatatttttcaatttctccgactaatcccatatccgccggtagccactccaaacttcccagtgtatccttcgtcaaccattttgcagcttcatgttctttgagcaccaaatccccggatttgattttacaaataaagcaccccatagataaatgaaagttcggataatcgtattcaaccgtatccaacaactcaatcacttccacttccgtatctagttcttctttaatttctcttacaatcgcttcttctggtgtctcgccaggttcaatctttcctccgggaaattcccatccatctttaaattcaccatatccgcgctgtgtcgcaaacactttgccgttttcaattattatagcagcaacaactctaactgtcttcatgaacaatttattcctttcctcttctcatcgctgaacaccattacccatttataatgtactcgtaaatatcctctcgaaccggagtatccaatgcccattcgatttcaactgctgatttatccgtattcggcattataaattcttttacttcgcccgtagcatgcattcgccccaaataatagaattcttttgatattttatcatctttgttttttctcacaaaaagctgaacatctattcctcgttccttcgcatttaagaaattctgcacatcttctgattcaatacttcttccactttttgaaatcgcaatcaatcgattgtggcttgtaaaatgatcttcgtattttgtagtatcactaatatcatcctgcttatcatagttgataaatacaggaaatgtttttgtttttttatcatacttataaccaccaatattcaatggaacttcatttctttcccaatttaacaaacgacaagcatcttcgtatgtatatttttgatacagaactaaatccgtatcttgataacgcatgctgaaattttctttataacgagaaataccaaagtcaattagttcttctaagatattatagaaatcttcatttttcagcatttcgccaaatgattgggacatactgtagtctgatccttctttttctaaaaaaacacactgagaatatgttttcttagctgcgcttgtagggaattcatttgtcatcatgttaacaacattctctgcgcaatcatcatccatggaacagttataattttcatgcaatgatttctttaattgggccatgattccatgttgatatttaagcaatcgtttcaacatttccagctcatgaattcttttcccacttgccagctttttagaaacgaattctattaccttttcttccgcttcggacaaccgaattgtatattctttttcatatttcacaagaaacttataataagagcccaaactattattatcaaaaatccgaagtacatccatttcaccatatttatcaaaatcagccaatgccggaatatgtcctaacttatttttcagatttgtataattctcacgaatcaatttaatatcactgaaattcgcattatcaatcgcttgaaaaattcgttttcttgaaacctcgtcaaagtggatcgtacttgccccagggattactcgtccgccttctgtaacataacggcgaatattatccttgttataactgagatctccggaaagtgcaattggaatcatgaaattgttacgataattcccaataaaatcaataacaactacgtattctttatcttctgctttacgaaggcctcgtcccaattgctggataaaaataactggagattccgttggtcgaagcataataacttgattaatttccggaacatctacaccttctgagaaaatatccacagaaataatataatccaatgcatcctcagcttcatcaccggcaagtctttcaatagctactgctctcgtcgcttctgaatcgctaccacttaatacaagcgttctccatcctttttcattaaacttggtcgatagttctcttgcctcgtcaatacgactgcagaaaatcaagccttttactctatctccactatagccaaaaaattctgcctgtttcatgacattatgtacacgctcatccgatgttaaacatctgaaattttccaccttttcctgcttagattttccagcatctgcgatgacttccaaatcggtaattccaaaataatgaaacgggcaaagcaaatcttcttccatagcatcctgcaaacgaatctcataagcaatctgatggttaaaaatttcataaatatttcttccatccagattatcatcccgtttatccggggtcgccgtcatcccaagccaaagtttaggctgaaaataatccattacctttttataactatttgcagcactatgatgcgcttcatcaatcacaatcgcatcaaatgctgtttttccatatttctctaatatctcgtctttactcaatgtctggatcgtagcaaacacaaaatccgcatcatatttctgatgttttcccgtaaccagtcccatcaccacttgtccaccaaacactttccgatacgacttcatggcttgttttgcaatctgatttcgatgtaccaaaaacaaaactctctgaaaccccaactcacgcatagcaaaagcggaggcatatgttttcccagtacccgttgctgaaatcagcaatgcccgattttctccagcctcatatattttttgcagattgttgataaatccaacctgcatagaattcggctgtaatcgataaacctccaaagatggaatttctgtctcacgcgctaatttcttctgtttttgaataatcttatttcttgtataagcatctgtatatctttcaataaattcttcaaaaggcaatgcctgctcagaattccacagttggtcgaattcctctacaacattatgcgtatattccccctgctctgttgaaacaatctttgtattccattcccgatttgttgtcagagcacttgatgtcatattggaacttcccacaatgatccgatatatttcttcctttttgaaaatatatccctttgtatgaaatccttcttttctattttctgtcacaaacatctttagctcaagattttcaaactgtgcgagctttcgcagagcctctggttcactgaatgtcagatagtctgttgtgagtatctttccccggactccacgatattccaactcccgcaatgtctgaagaagcggcgtaataccgcccattgtaatgaacgcaacactgattgcaaattcttcacagttcagcagctcgtcctcaacagatgagattaccttacgcccttctttataattgtttgatataaactgtggcttgtatgccagatttgacgcatgactgtaattgataaacgctgtcgtcaatccttgtttcaactgtataatcttcttttcttccatatttgttccttttcgatctttttctgcactatttctcttattttagcattttaccaaaataatcacaatcagaacttcaaaacagggaaccccgcttccgccaaaggttccctgtctcattcctttttattattccaccgataatttccccagaaattcctgcattcttccatgttctgatgtaaagacctcttccggagtgccttccaccgcaatgacgcctttatccataaaaataatcttatcagccacgttccgcgcaaaattcatttcatgtgtcacgatcaccatagtcatatgctctgccgccagatccttaattaccttcaaaatctcccccgtcaactccggatccagtgcagaggtcggttcatcaaaaaacagcatcttcggtttcatcgccagtgcccgtgcgatcgatacacgctgctgctgccctccggagagctgatacggatatgcatccgccttatccgcaagtcccatctttgtaaggagcttcttcgcctcctcatagacttcttctttctctcgcttctgcacacggatcggtgcatctgtaatatttttgatgacggaaaaatgaggaaacagattaaagttctggaataccagaccaaagcaggactgaatttctttcatctcctgctttttcggaaacgcgggtcttccattttccacccatgccgctctttttcccagatacaaaatctcaccgtcatcaatcgtctccagcatcgtcgcacagcggagcagcgtagacttgccggaaccggacgggccgatgatcgccagaatctctccctgctccacagaaagcgaaatatcccggatcaccggcatcccgccgaattcttttttgatatgtttcatttccaaaagactcattccggaaacctcctaatgataataattcagctttttttcaaataattccatcactccggcaaccacatagttaaagatatagtagtaaacaccggcaataaaaaatggaagtacggttgtctgtgccgccgcaatctgttttgccactgcaaacatctcaatataagacagggaatacacaagggacgtatctttcaccagtgtgatcacttcatttgtcacagacggaagcacattctttaccatctgcggcagcacgatccggaaaaatgtctgccctctggaataccctaaaagtgtggctgcctcatactgtcctttcggaatcgattcgattccggaacgataaatttctgcaaaatatgccgcataattcagagagcatccaagaaggatcgccgtcagcttatacccgccgatattcatctgccacagataatacggtgcgaaataccacaccagaagctgcagcatcaacggggttccgcgcatgatcgagatatagatcttcacgatccagctgatcggcttgatcctgctcacccttccgaaatatacgagcatccccagaggcagagaaaagatcagcgtcataaaaaagatcaggcaggtctgtccgaatcctgctgtcatttgcctcaacatcacatcaaaactcatatctcttcccctcttattttaaagtcaccatatccgcaatctcgtatttctcagccagctttgcaactgttccgtcttctgtcagttttttcagatccgcattgactacgtcgcacagctcctgatttcctttcttaaacccaatcgcatactgctctgtattcaatgtctcatccagaatcttatatccttcccctctggacttgatctgataattggcaactcccacatcgattgcaagtgcatccagcgcgcctgcctgaagctcggtaaatgcggtgttgtaatctgcaaactcattcaaagctccaaatgtatctgccagttttttctgaccgccttcttcttcactctgcagcagatccagtgccgcgcttgcagcctgtacaccgactgtctttcccgccagatcttccagggtatcaataccggatttttctgccacaacaatcacctgactgttgtctacatacggagttgaaaatgtataatcgtcttcccttccattcatggtaaatccattccagatgcagtcaatcgaaccggaattaagttccatgtctttggaatcccagttgagcggtttttttacaagctcccagccttccagtttacagactgcctctgccagctccagatcaaatcctgtgtattctccgttctcgtccatatatccgtatggcggatattctgcatcaaatcctaccgtaaacgttttcttatcttccacactttctgctgtctttgcatcttccccggatgcattgtttttttctccacatcctgccagtaccattgctgccatcgctgtccctgccaaaatcagcgctaatttctttttcatctttgtttcctccctgtttgtacgtcattatgctaatgattgaccactttactatactaaactgtttttcatggtatcatatatttccggcattgtcaatgtttatcgtgacaggatatgtaaccttgacagaaaattccacaaatagtatcatttacttatgttatgaaagagaggaatttttaaatgtcaaacaaccatgaagaacagatccgaatcgtgcaggagaccgtagccggcaaagagatcacctttgctcatgtaatgggtggtccggcgccgatcgtatatcagaaacttggtctgaatccacaggtcgattatcgttcttctgctatcggaattatgaatatgacgccgccggaatctgctgtcatcgcatccgatatcgcagtaaaaagcggaaacatttaccttggatttgcagatcgttttacaggaacactcatcatcacaggagagatttcagacgtcatgtctgccctgacagaagtggtaacctttttcagagattctctgggatatgtcgtttgtgatattacaaagagataggaagtgtgactatgactcgtataacaaaggaagaacttctggaaaagattttcaatgatgactatgagcatctgaaagggaaaaaactgcgcatgacacgtgttcgtgttcccggcaaagaagtttgtctggctcacatcatcaatacttcccagacccctgtttatcagaatctgggattgcatatcggtgtacatgagggggaggatcacaccggagaatccattggtctgatccgttttaccccatgggaagcagttgtcgttgctgcggatgtggcaatgaaaagcgccgatgtagaaattggatttatggatcgcttctgcggttccctcattttaaccggcggtctgtcacaggtacagactgcggtggaagaagtcgttcgattttttcatgaagatctgggatttcgcacctgtgagatccataaaaactaagaggaccggagacatgacgatatgaaaaaattatttttgatgggaagaagtgaagccggaaagacttccctgacacaggcattaaaaggggaagagcttcactatgaaaaaacacaatatacgattacggcggatgataccattgactctccgggagaatatgctgagtcaaaacagttcggtgccggtcttgcatgcttttcttttgaagcggacgttgtcgggatcgttcaggcagcggatgaaccatacaacctgtttagtccctgtctgcgcacgtttatcctgcggccgctgatcggcatcattaccaagaccgattccccctatgccaatgttcctatgataaaacagtggcttttaaatgccggctgcgatcgtattttccttgtaaataacgtgacccgggagggaattgacgaattgatggaataccttgccgaagatccggtcaagattaccatggaacaggcaaaattcaaacagcatctggggctgaatgaatgggatcctctgccggatggcgtagaatatccggatggaatttaaataaacttcagtaaaacacaaaacgagatgcatttccatatgatgcatctcgtttttatgttttacaatctatccggactgttcgcttcctacacttctttctgtcctctgagccgcttataatagaatcgcagctttccgatcagccaggtcagatatcgcagcaccggctctgtcgcaatggcaaataccacaaacagcatcacgcacttcgtagtcatccctgtaatcgcaaacagatcattgaggaaaatgctgcagaacagaagtcccacgatacatccgccaaggatcacactgcgcagtacattcataggtgcactgatcgtgtacaggatcataaatcctacaattgataacagcattgttgctgctgtggaaatatcggctgaactcactccaaatgtccgtccgaatatgaccagcgccccaactgccagcacatcagtcagtgccgcaggaagtgcttttaagaatacgtttgtaaggaaatgccctttgattatattcttattcggctccagtgccaggaaaaatgccggtactccgatcgtaaacatactgatcagtgaaatctgcgacggttccagcggataggtaaacataaatacaaaggataccagcgacagcaggaacgagaaaatattttttacaaggaacagactggctgaccgctgaatattattgactactcttcttccctccagtaccacttccggcatacaggagaaatccgattccagcaggacgagctgggatgcctgtgccgctgcatcacttccggatgccatagcgatactgcagtccgcatcttttaaggccagcacatcgttaacaccgtctccggtcatggccacagtctttccttcttccttcaatatctgcacaaatttccgcttctggttcggagtgacacggccaaatactgcattgttcaggactgctgcccgcatctcctcttccgtatgaagcgtggacgcatccacgtatcgttctgcacctgcgattcccgcctcttttgccacctctgacacggtcaggggattgtccccggaaataactttcacctccacaccctgctccgcaaaatacgtaaaggtctctttcgcctcctgacggatcgggtttgctaacagtacataagccagaggcgtgactgcttctttcaaaggcttcccatccggttcttcttttgctgttccaaataccagaacgcgggctcctttggacgcatgtgcactgattgcttcctcataattttcatactgttctttgagcacaaattccggtgctcccaacacataggacgcctcttcaaacgtcacactgctgtacttggatgcggaagaaaatcctgtctttgccacagccttcttcccggatgcgattttaaaataccgtttcattgcttccatggtaatattatcactgctctgtgctgccgtaaaatctcccagaagctccgaaagcgggcacagctcaccttcctcgtattccttggtcggaatcacatcctgcacttccattgtattttccgtgatcgttccggtcttgtccacacacagtacattgacccgggcaagcgtctcaatacacttcatgtcatgcagcaatacttttttctgtgccagacggatcgaacttactgcaagcgccacactggcaagcagatacagcccttccgggatcattccgatcacagccgcgatcatggacgtcacactggatcgaaacccttcgccctgaaatacaaatgcctgaataaacaaaataatcccgattggaatgatggcaacgccgacccatttgaccagcttgtccagagaacggatcatctccgactgttctgtattctgcatagcttttgcttccagtgtcagcctggaaatataagaatccgcccccactttgtcaagccttgcatgacactgtccggatacaataaaacttccggacatcagctgatcgccttttcgttttgtgatctcatccgattctccggtcagaagcgactcattgacctgcacttctcctgcacacacttcggcatccgcacacacctgatttccggcttcgaagattacgatatcatctaccacaagatcttctgcattgatctgactcttctttccatcccgtatcaccattgcatgaggtgcattgagcatcgtcagattatccagtacttttttcgccctggtctcctgaatgatcccgatcagagtattcaatacaattacaggtaaaaaggtcagatctcgaaaggaaccgaccaggcaaagcagaactgccagtaccagaaagatcaggttaaaataggtaaagacattttcctgaatgatctcttttgtagtcttagacggcggatccaccggctgattggtccacccatgcatccgatgctcctgcacctgctgcgcagtcagccccgtctgatgatccggtcggtatcttgtggtgggaatccgcttctccagtgtgatctccatcgtctgcgtttcgtctatgcttcgttttactcttctttctccacgctttttctgccgcatttttctcgcttccttccgtatgtccaatcctgataggatctttgtttcgtataattgcttacattttaacacactgaatgcgtttttccagtagattccagaaaactttagaaaatcttcaaaaactcttcttctaaaacaggaaaatcatacagattccttgtcttcttcctccatttcccttataataatacaagtatttcaaagaaaaggatgatagtggattactatgaaattaagaagcagacttgcaattacatgtgcaaaagggacaagtgacctgatcaaaaaattaaaccgcggaagcggcgttaccctccccggatatgtggcaagattgatcgatcccaatattttaagcgtcatggcttcccagatccgggagaagacgatcgttaccatgggaaccaacgggaaaacaacgaccaatgccattttatacaaagcattgaaggccgagggaaaaaccgtgatcatcaaccgcaccggagccaacatgctcaacgggattatttcggcatttgttctggccacagacaagcacggacagctgaatgcggattatgcctgcattgaggtcgatgagatcgcatctgtgggagttctccctcagttaaaaccggactgtgcgcttttgacaaatatttccagagatcagctggaccggttcggtgaagtagatattacctttgacaaattgaaaacagccgtcaccagtgtccctgatacgacactgatcatcaactgcgatgatattctttcctattccctggcggaaacaagcggcaatccgtttgtgacatacgggatcagcgaacagatttttgatgacatctcccgctctgagatccgggaaagtattttctgccgaaaatgcggaaagaaactacagtatgatttcttccattatggacagcttggaatttatcactgcccgaactgcggatgggagcgcccggatcctgattttacagccacacagatcacgctcaaagacgaactctacgccttcgatatgggagatctgcacctggattctacggtacggacgccttacaatatttacaatacccttgctgcctatacggcactgcatactatgcatgccccgatggcacattttaaagagatggcagagtcttttgactatggaaacaaccgggaagaaatcctgatgatcaacggtgccagagtacagcttcacctgtccaaaaacccgatcggattccagcagaagatttctctcgtcttaaaagatccaaaaccaaaggatattatcattcagatcaatgatacgtatcaggacggagaagatgtttcctggctttgggatgtcgatttccagtatcttgcagacagcaatgcagctaccatcacaacgtgcggaacccgcaagcatgatatggggcttcgtctcaaatatgaggacatcgactgtacttcaactgatgatatgcgctcccgtgttgaagagctgaccgaaaacggaacgaaaaatctctacatcattgtcaactactccgggctttaccgcacaaaccgaatgctcaaagaactggcgcaaaatacaaaggaacagaaaggagaacaggcatgaaactgacgattggacacttataccccgacctgttgaatctgtacggagaccgcggaaatatccagtgtttccgaaaacgtctcaactggcgcggaatcgaggcagaagtcattcccgtactctccggagataacattgacttttccaaactggatatcgtacttctgggcggaggttctgacagagaacaagagctcgtctgcggatatctaaaagagattcgcaaggatttcaaagaatatgtagaggataacggcgttgtgcttgccgtctgcggcggctatcagctgctcggcaaatattacaagaccgataaaaagatgatcgaaggtcttggcattctggatatcacgaccgaatgggaaccggagcgtctcatccgcaacattatcctgaacagtccgctgtttgacactcctgttgtaggatttgaaaaccatggaggccgcacttatatcggagatcacactccatttggaaaagtatttttcggactgggaaataccggaaaatccggttatgaaggcgttgtatacaagaatgtgatcgcaacctacctgcacggacctcttcttccgaagaatccgcaggtttgtgactatctgttagagcgggcgctgaagcgcaaatacggtgaagaaataaccctcgctccactttccgacgatctggagaaaaaagcaaaccgttatattgtagaccgctacagtgataaaaaatatgtattaaaagagacgatcaaacgtcacacctgaaaagggcagaaaaaagtcccattggatcaaactttccaatgggactttttcattgcctgtttatttattttttctgaacatcagtttgatttttttcatcagctgaatgatcggaagatttacaagtgccagaccatatacgatcagcaactgtgtaaaggtcagtgtctgtactttgaaaacttcatccagtgccggaatcgtcattacacaagtgatcaacaccagaccaagcaggaatgctccgatcagataaatattgttccagaatctctttgagaagattaccggataatcagacttacagttaaatccgtgtaccagccttgctgtacacaatgttccaaatgccattgtgctggcaagtactgcgtttccgccttctcccgtcagaccgatcataaatccgatcattgtcgtgattccgatgcaaagaccttctgttccgatctttgtcaggaaatcttttgtcaggattgattcattcatcggtctcggtttttcatccattacctttttcgaatgcggctccagtccaagggcgatagccggaagactgtctgtcaaaagattgatgaacagcagatgtaccggtgcaaatggaaccggaagtcctgcgatagatgcatataatactgccaggattgctccgaagttaccggagagcaggaactgaatggaattcttaatgttctggtaaacatttcttccgttctctactgctttgacgattgttgcaaagttatcatctgtcagtaccatagaagcagcatcctttgatacttcacttcctgtgatacccatagcaactccgatatctgcctgtttgagcgccggtgcatcattgacaccatctcctgtcatggctacgatgtttcctttttcctgccatgcacgtacgatacggatcttatgctccggtgaaacacgtgcgtaaacagaaataccttctacaaagtttttcagttcctcatcggacatggaatcaatcactgcaccttcgcatgcttctgattcatcttccagaattccgattcgttttgcaatcgctgccgctgtcactttatggtcacctgtgatcatgatcggacgaatacccgctctcttacattccgcaaccgctgccatagattcctctctcggcggatccatcatagcgatcagaccaaggaatgtcagattgttttcatcttccagagacaactcttcttccgcagatactgccttgtaggcgaatccgagaacacgaagcccttctcttgaaaagctctgattctgtgcttcgattttttcaatatcttccggagtaatggcacgcacttcatctccacactggatgcttgctgtacgtcccataatgacatcaaccgcacctttgacaaccatgatcggtgtctcatcaatcgtgtgctttgtagacatcagttttctgtcactgtcaaatggattttcgctctcacgcggatattctccacggatcttctgaatatccagaccaagcttgcttcccagattgatcagggctgtctctgtcggatctccgatctccacaccatctacgttcgtagaatcattacacaaaatactgaaatacatcagtttttcctgctcagaatctttcacatcgatcttatctgcaggaatcactgtttcattgacataatactgctcgactgtcatcttattctgagtcagggtacctgttttatcagaacagataatagaaacacttcccagtccttccactgcctgcagttttcggatgatcgcatgttcttttgccatcttctgtgtaccgaaagaaagtacgattgttacgatagaactaagtgcctccggaatcgctgcaactgcaagtgcaactgcaaacaggaacgcatctccgatattaccaccgcggaatacattgattccaaataaaataccacagaacaccagaatgatgatggaaagtttctgtccgaactgatccagattcacctgcagtggcgttttcttttcagatgtggtctttaacagacttgcgatcttaccgacctcagtctccataccgataccagttactacaaaagaacctcttccgtatgtgacaaagcttccggaatataccatattcgtacggtctccaagcggaacctcgccttcaatggcatctgtcattttttctacaccaagactttctcctgtcagagcactctcgtctactttcagactggcgctctccaaaagacgtccgtctgcaggaatataatctcccgcatccagcataacgatatctccgactgttacttctgcagatggaatcggaacaacacttccgtcacgcaatacttttgcctccggtccggagagctttttcagactggccagcgactgctctgccttcacggtctgtaccgtaccaagaatcgcattgatcgtgattacgatcaggataacaatggcactctccgcatctcctaaaaatccggagacgatcgctgcagcgatcaaaatgatcacaaggaaatctttgtattgctccagaaagatctgaagtgtggttttcttctttccttccaccagttcgttcgggccgaatttttcctgatgggcttttacttctgcggacgtcaaaggttcttgtttcccattgatttcctgcttgacttcttctgaagaaagctgataataatttttcacatgaattcctcctttttcttttatgcaataaaaaagagacttttattgcacgttatgtatgcaacaaaagtctcaccatttaatcacgatacggatggacttctccatcgtactgacgacatcgtgcacgccataagcgctggttactcccttttatttaagaaaactataaagcattttccttttgttgtcaacgattttttctgcaaaccatactacattcccagtttttccttgattttccgcgcttccagcgtattggcaactccgccttctccggtctcacgcagagagacgtgcatactctctccgacctccttcatcgcatcgatcacctgatccggcggaatcctgctggtaattcccgccagcgccatatccgcagatgataaagcattgacagctccgatcacatttctctttacacagggtacttccacaagaccggctaccggatcacacaccagtcccaacagatttttcagcgccatggccgctccatgtgagatctgctcttcatctccaccctgtaaaaacacgagtgcgcctgctgccattgcagatgccgctccaatctccgcctgacatccacctgccgctccggcaataaatgcacgggatgcgatcacctggccgataccggccgcggtatacaatgcatggatcacctcatcttccgatacccgttcttcttcataaaggggaaccagtacagccggcagtaccccacatgcacctgctgtcggtgctgccacgatccgcttcatacaggcattggattctcccatctccaatgctcttgcaatcacctttgagacaaatggaccacacagcggctctttactctgacggtattcctccatctgcgcccccatctttccgaccagtccgctggcagagacctgtgtcctgtcatactgctcactcgctgatttcatcgctgtccacatctgctgcatcgactgcattgactccgcctctgtcacagatcgatctgccatatcttctaaaaggaccgctctccaaaacaaaacgttcttctcccggcaggatttttgaatctcctctaatgaatgaaatgccatccgctataccccctctgtctcaatataagtcactttgctgataccgtttaaacgttccagatcccggatcgtgtccggttctacaggctgatccgtttcaatcaccataaccgcataaccgccccgcttgtccctgtgaagctgaagtgtggcaatattgactttctttccatataatacagaagtcacctctgccacttgtcccgggctatcttcgtttcttatgatcaatgtcggacaggcgcctgtacagtttacggtgatttcatccagttcattgagcataattctccctccgccaagagatgatgcctgcaccacgatcgtctttccgtcaactccttctacatccaaaagcgctgtatttggatgcgcttctttaatctgtgtattgtatatttcaaactccagtccttcctgtttcgcaacagaaaaactatccggaatccgcatatcatctggtttcatccccaaaagccctgctaccagagcacgatctgttccgtgtcctctccctgttgccgcaaaagaaccgctcaatccgatccttgcttttttcgggcggctccccaacagctttcttgtaatatagccgatccttgctgctcccgcagtatgggaactggatggtcctaccataaccggtccgagaatatcaaatatattcatctttcgttctccttcttctcttgtctattattgtagtatagcaagtttttgtcaaaatatccattccaatctgccagcatgatacataatctttcgtgctcttcctgcagcaattttcttccatgttctgtgatcacataagactttcttcttccttcttcttttgtcctgaaaataatctgatttttctcaaatttagacagcattgtatacagcgttcccggaccgaccttgactcttccgccggaaattttttgcaccttttccataatgtccactccacagcattcttcggataacgctatcaaaatataatacatcggctctgtcagtgtctgaaactgctctcttgccataatccacacccttctttattctttcaatttcagtcgttcttccacaacctgaatctgttcttttgtcagaggttcttccactgaaagacgtaaaattttctaattataacagatgtagtaaattccggaaatgaaaaatgccatccagatgctgctatttcctttagatattctgcaaatgcatcgcattccagatatccaaaactacgaaacactcttttctttgttctcatgagatttcctcctcccaaaaagaaatatcgagtatcgataatttatacattcattatattatcgatactcgatattgtcaatttatttcagaaactcatttgcaaacatcgccagtgcattctcatcccgactgtttccgattccgtgggtatccacaaattcttccgctcttctggcatcctcatgcgtaaaacgatatacttttccaccattctttttccatgttttttcgatcacatcctgatactcctgttcctgataccatttggagtctacatgaagtcctccgtttttactgtatgcttctttttcgtcctctgtcagagcgtctgcatccacattctcattgatccgataatatttttcactgataaaacgaacattctgtttatgcggtgcttttaaaatttctccatctttgacaacatacacagtaaacggccgaaccgtttcttttcctttgccatccggacccatgctgtcctgaacatgccaattcaacacgatataccctgaatccgtaaatttttgaaattcctccggatgaaaatcgagcagtttcaatttttcagaaagatctccttcttccgtgtcattggcttttacttttccttctaatattgcctgagtctttaacacttcttccgtaattgcaccctgctgtgcctcttgaagagtaaaatagcgatcctgtgcttcaatcaccggaaattcattatatttgatcttaacgctgcaggactcttctgtaatatttccaatgctgtccgtaacctgatatacgactttatgtgtgaccgggctgtcttttttatccagctgcaaaaaccacgtatccagaagttcttctgatgacattccgtctttccatgttttcacctctttatccgcttttccatcttctgtcagtctaccgggcgcatattcaatctgaacgatcttaatctgtgcagttaattccccatcttcccgatccgtactctgaacatctttcaacagatcctccttttttacggtctctccttcaaagtactctttatccggtgctgaaatctccggagcccggtcccagattgcatacaatgccacttttgccatttccctgctctccccggtttcggttctctgactggcagcaatctttcgaagttcttcataagaaattctgttttcgcgattttcctgaaatgccgcttcttttgcgcccacatccgcacgctgatcccagcctgcaaatgtatgcctgctcctcttataatctgtatagcctttatttttctgaatccggtatccgttttggagacaatcctcataagaaacaatttccgacttttcctgtccttcttctgcgtgatttcccagataacggatcgatacccggtcctcccagattgcatacagtgtcagattctgatttttctcagcaggaagattttctcccggctgatactgtccctctttcgccgtctgattttcattccatcccagaaacggtacgtccagccattttggaatctgttccgaaaccgctgctttctcataccagtatttgacagacggttccggcatctgttccacctgtgctttcgtgtttttatcatactgcaccgtatattcactgctgatcgtaactgcttcttttaaagtacctgcacgccgatcctgataatctcccgggcgcaggcaatatctgctttgtggtgtcagcaaaaaccgctcccactccatacttcctgtacggtttccataatttacctttacgaccattctgccattctcatatcggtccggtgtaactcttgccgcaggaacagactgaagcttttgcattacctcaatgtatttttcagctggcagatatacgtcattcccttcatctaccaatgctgaaccactcatctggtaaattccatcctgataaacaccggaaccgatctctgccgtattcgcggaaaaatttcccccttcctgtttcacggttccattctgattgtagattcctccgccccggttttgtgcacgatttccataaaaactgccgtctttcaaaagaatctccccatcctttaaataaatggcacctcccagatctgcctgattctcacaaatcgttccgctattccatataatcgttccgccattgagaaagatacctccaccgtttcctttctgtccgcactgttccgtattcgcttcttttgcattgtttcttgccagagtcgtattattaaccaccgtgcgccctttactcattgttgcaattccatggacgccattctcatagctgcatccattcacacttgcttctacattggaattgcaaaatccagtactgaaccatcctgagtagagatctcccacattcggatgctgtgaagtgctttgccatccatgatacctctcattggacacatttacctgaaatgcagaagctgcaaccgaagtaccctgactgaaactttccccgatataacagttctgaaacgtatttccctgaatccgtgcacttatcggtccggtatatggagcttcatcacttcggattccgtcaatcccgatccggcagtttttaaatacattgttctgaatctctgcacggatatttgccctatgtatagaaaagtgaaccgctccgatatcctcaatcccatcaaacacagaattttgcacgcgaaaactgatttctgtcggcgtgaatgcagaacttgcctctgtaacaactcccactccattgtcgcaattttgaaatttacactgatccactgttacagaaccatattctccgtggatcatccatcttgacagctggtctccattttgaaaaatgcaattttcaaatgtcacagaacttcccttatttgcacaaatggcaccacaatacaaattatccgaatccggaacggaagttccacttaaatcaaatgtcaatggatcgcttcctttacttccgatcacaacacttgattttgtaaatgccagtctgtgccggtccggcatcctgaccgttctcggaccgccctcgggcaaaatccggacattctgaaactttctcgttctggtcttttccacatatacaaaactatccttcatcgcatgactctgtacaatataaatcgtttcattatcctttactgcattcaaagcctccgaaagatcctcatagtatgtatttccaatccggcaggcgccttctgctttctgctctttggacacgttgcccggcaatgtttcttctttttcaacaggctcttctttatcatctgttctgctgtttcggattttttccaggcatgcttccaccgaaaaagacacctgtgtctgcaaaaactctccatatcgctgcagactgtccacccggctttcttttccatcaatcacataagattgcccgttttccggaagcatttttataagtgcttccgtgagactttgcttttcttcctcactgattggtgattcctcccgtctcttccattcctcaaccacttccagatacattttggtatcccacgcagcctcttcttttccgatatgttctttgatcatcaaataaggtaaaatttcctgcaactgataaagctctcccggagaaagtgcccccacaaactgtatacgctctttcatctgactcaaatatgtataaggctgctccgaagcgatcagtatttccatgttacttttttcttctttctgtatctttgtttcccatccggcatccggctcctcggcagcccatacctgcaaaccgccaaacaacagggaaaatacagtcaaacctgctgccagatatctccgattctttcttcttatattcgcacctccatttcttttcctactgctgtcagacaactgtcggcggagcgcgaatgccatcagtctcctccatctgctccctcctttcgggtacaaaaataaaacaaacttttcgtctatctctcctgtatgcttcttgctataactggaatacattttactgatgtgatgaaaaccatcacttctgaatcatataaaacgatgaatctgtacttcagattccatgaatttttagaactcagaaaccagatctgtctctaagtgatatggattataacacctgttctgaaaaaaagcaagcagaatacacaaaatgagcagacgaatactgccgcctgctcatttcacatatttgcttgctttagagattatttttgtatgatttgtaatatcgtttatacaattccctgcgcggtcattgcttctacaaccttctcaaatcctgcgatattggcaccaactacatagtttcctttcgcgccatatttctcagcagcatctgccatattgtggcagatatttaccatgatctgctgtaattttccgtctacctcttcgaatgtccagcttaaacgctcgctgttctgagacatctccagagcagatgtcgcaacaccaccggcattcgctgctttaccaggtgcaaacagaactccgttttcctgcaggtattctgtagcttccattgtggtcggcatatttgcaccctctgcaaccgcaatacatccgtttgcaaccagtgcttttgcgtcttccagatgaagttcattctgtgttgcacacggaagtgcgatgtccacttttacgctccatacgcctcttccttcatggtactctgcgtttggacgataatttttatattctgtaagtcttgcacgttttacttctttgatctctttgagtgccgccagatcgataccttccggatcatatacccatcctgtagaatcgctgactgtcacaacctttgctccgagctgctgtgctttttctgtagcatagatcgcaacatttccggaaccggaaactgcaactgtttttcctgccagttcgattccgtttaatttcagcatctcctgtgtcagatagagaagtccgtatcctgttgcctctgtacgtgccagagatcctccgtaagtaagcccttttcctgtcaggactccttcaaatactccgcggattctcttatactgaccgaacatgtatccgatctctcttgctcctgtaccgatatctcctgccggaacatctgtatcagcgccgatatatttgcataactctgtcataaagctctggcagaatgccatgatctctctgtctgattttcctttcggatcaaaatcagaaccaccttttcctccaccgatcggaagtcctgtcagagagttcttgaaaatctgctcaaatccaaggaatttgatgattccgaggtttacagaaggatgaagtctcagacctcctttgtaaggtccgatcgcactgttgaactgtacacggtatcctgtgttaacatgtacctgtccgttgtcgtcaacccatggcacacggaatttgaactgtctttccggctcaacaagtctttccagaagtgcatctttacggaacttctcctcatttgcttctactactactcgcagggattccagtacttctttgactgcctggtgaaattccggctctgcaggatttttctttacaactaaatcaattacttcatcaacgtatgacatcattattacctcctgaaaatagaaatacccaaatagataaattgcatccgggttttacgagacatcttgtcctttttctatattatagtgatatttcccgattgtcaagaatttcttgcatcaaatttcattgttttaatactttgtcttgataaagtttttgaaattttagatttgaaatcctgcatttttcttctttattgcataattcgtatactcataatctcccttgcatgaacaactgcctctgcaatctttaattcacattaaaaatagagtgtcttccgacactctacttatctgcacatattagttatatttacgttttctagcagcttcagattttttcttacgtcttacgcttggtttttcgtaatgttctcttttacgaatctcctgctggattccagcttttgcgcaatttcttttaaatctgcgtaaagcgctgtctaacgtctcgttttcttttacgattacatttgacatagtctcacacctaacctcccctccagcctggtattgtgcatcatacgactgttcgggtatttttattgcactacaaagaattataacatatttttcggaaacgtcaactgattttttccatttttttaagaaagttgtccttccagtgcttctgctgcttttttcagtgcttcctggattcctgccgggttctttccaccagcctgcgccatattcgggcgaccgccgccgccaccgccaacaagacctgcaatggcttttacaaggttacctgcatgagcgccctgtttcattgccgcatctgtcgcagttaccatcaggctgacttttccatcatttccggaagccagaacaacaacaccttctccgagtttttctttgagctgatctccaagatcacgaagcccgttcatatcgactccatccacctctgctgcgagaagtttcacacctttgatctcctgtacctgatccatgacatctcccatggcatcctgtgccagtttgctcttcaagctttccacttcactgtgcagcgccttgttttctgctgtcagatgcgcaatcttctcagccagattatctggtgtcgctttcagtacttttgcagcttcattcagtttcttttccagattgtcatagtaacggatcaatcccttggatgtcagtgcctcgattcttctcacaccggcagcaactcccgattcagaaagaatcttgaacgccatgatctcatttgtattctttacgtgagttcctccacagaattcaatagagtagtctcccatattgacaactcgtaccacatctccgtatttttcaccaaacagggcctgtgctcctgtctttcttgcctcttcgatcggcatgttttctacttttacaggaagtcctgccacaatctgctcattcacgattgcttccactttctgcagttcttccgctgtcatggcagagaaatgagaaaagtcgaagcgaagtctgtcttcgttcacgctggatcctgcctgctctacgtgtgttccaagaacggttctcaacgctttctgaagcaggtgtgtcgcactgtggtttcttgcagacaatgcacgtttttcagcatttacacacaattctgcctgatcccctattttgatcattcctttgatgaccactcctacatgaccgatctttccacctaaaagttttactgtatcttctactttgaattcaccttctgctgtacggatgattcctgtgtctgcctcctgtccaccgcttgtcgcatagaacggagtctcttctgcaaatacagtacctctctgtccgtcagaaagcgcttctacgatttctgtgtcagaagtcagaaccgtaatcggagacttccatgccagattgtcatagcctacaaatgtacttgtgatacttggatcaatggattcgtaaaccgtcacgtccgctcccatatagttcgtctctccgcgggctgcacgggcagtctttctctgaacttccatggatgcgtggaatccctcttcatccacctgcattcctttttcttccaggatctcttttgtcagatcgatcgggaatccatatgtgtcatacagcttgaacgcatctgcgccagacagagttgttgtctgctctgcttccattttcgctgtcatttccgcaagaataccaagtccctgatcgatcgtcttgttaaactgatcttcctcttttgcaatcatttttaaaataaagtctttcttttcttccagttccggatatccgtcttttgatccttcgatgacggtctgtgccagttccggaataaagcttccctcgattccaagcagtcttccgtggcggcatgcacgtcttaacaaacggcggagcacatatcctcttccttcattggacggcataattccatcagaaatcataaaggtcacagaacgtgtatggtctgtgatgacacggatggaaatatcagcctgtgcatcttttccatactctgtatcagcaagacggcaaatgtgatcacgcagtgccttgagtgtatccacatcaaagatcgaatctacatcctgtacaacagatgccagacgttccagtcccattccggtatcaatatttttctgctccagttcggaataatgtccatgtccgtcattatcaaactgtgtaaatacgttgttccagatttccatataacggtcgcattcacaacctaccgtacaatccgggctgccgcatccgtatttttcccctctgtcataataaatctcggaacaaggaccgcatgggccggaaccatgctcccagaaattgtctgcttttccaaaacggaaaatacgctctgccgggatccccattttcttattccagatttcgaatgcctcttcatcttcttcgtatatggacggatacaatctgtctggatccagacctactacctctgtcaaaaattcccaggaccattcgattgcttcattcttaaagtaatctccaaacgagaagtttccaagcatctcaaagaatgtaccatgacgtgctgtctttcctacattctcgatatctcctgtacggatacatttctgacaggttgtcactctgcgtctcggcgggatctcctgtcctgtaaaatatggttttaacggagccatccccgagttgatcagaagaagactcttatcattgtgtggcaccaaagaaaaactcttcattgccagatgtcccttgctttcaaagaactccaaaaacatttttcttaattggtttactccatatggctgcataccttatcctccggtttcattcgctaatctcacaaaaaggggctgccgcaagacattcgttttgcagcagacccacgtctaatttatcataccacagcttattttttttgtaaatcctattctagctcaatttcttccagctctttcggcggaatcggcgtagttgaattctttacataagctgccagatcctttttcgccttcaataccggaatattcgttcctgctcctgcaatacatcctccgggacatcccatcccctcaatcaggcagccgttaagtcttccggctttggcaagcgtcagtgtctttttgcactcggcaagcccttctgcatgctcaatgctgacttccacatccggatagtattcattgatacacttttcaatcgcttctgctactccgcctgcacaggcatatcctcttccggcacctgtcgcatcgtggaaagaggactctgcttcatactgggaaagatcaatctctttggcatcaaacatcgcctgcagttcttcaaaagtaactacaaaatccacatcacttcgaacacttcttctggaagcctccagctttttcgccgcacatggtccgataaagactactttggcattcggatgctcttttttgatacttctcgctgttgccaccattggtgtcagttcctgtgaaatctgatcgatcagatccgggaagaatttcttcgccagcattgcccaggaaggacagcaggaagtcagaaggaacggcagctctccggtcacgactttttctacataatgatgcgcctcggcaactgcaccgatatctgctcccagcgccacctcatgcacgcctttgaatcccaattcaatcaatgccgccttgatatttcttggattaatattctctccaaactgcccgacaaatgccggtgcaatctccgcaatgatctcgcttccctcttcctgtagtgctcttgtgagctggaaaatctgggacttatccgaaatcgctccaaacggacaactcaccatacacattccgcaggacacacatttttctgtgtcaatataggcacggccgtatttgtcagaaacaatcgctcccacaccacaggcatttttacatgggcgctcttttttcgcgatcgcatcatacggacagactgccttacattttccgcatttgatgcatttttcctgatcaatataggattttccgttgaccatggaaatggcacccttcggacagacctcactgcacggatgtgcaagacaccccttgcacatattgctgacttcatatttgttctcctcacagctttcacaggcagacggaatcacctgcatcagcggcggctcataatatttttcggaaatattactttcctgcactcccgccgtcagatgtaccggcttgtcttccgggcgcagggaaagtcccatcgcaagacgaagtcgctcccgaacgatcgcacgggaacgatacgtactctctctgtactttaccgtatcatcattgacaatctcatacggaatggcttccatatcttccagcagggtctctgaatttgcttcaaatccaagctttgccacttccttgaacacacgtctgcgaattgctctcacctgggtatccaggcctctcatattggacattttgatttcctcctttgtctgtgactttttattgctgcagcagtccttgtgcgtaatacacggactgcattgcatcttttccataaaaatctgcaccgatcatatctgcatattcctgatttaggacagcgcctcctaccattactttgcaccacggtgctttttctctgagctggcggatcgtctcctccatactgacaacagtcgtggtcatcagcgcactcaatcccacaagctgaatctgctgtgcaacaacagcatctacaatggtctccggcggcacatcttttccaagatccactacctcaaaactgtaattctccagaagaacttttacaatattcttgccaatatcgtgaatatcgcctttgactgtcgcaagcacgattttttcttttttctcctgcacgtctccactgttctccagcccttcttttaaaactgcaaatgctgtttttgcagcctctgcgctcatcagaagctgaggcaaaaagaccgttcctttttcaaatccctttcccacggtatccagcgcgggaatcaagtgttcattgatgatatccaacggctttttctcctgcatcagcacatttgtaatctgatgtgcttcctcttttaagcctttttcaatcgcagcctgcagtgtcatcatcccccctgctgtctgccctgcgccggttgtaatacttccgggcgcagaagcgaactctacattagcacttccgtagcgtccaatgtaattttcacagttcggatccagattcatcagtacatgatacgcataataggaacgcatcatatcttccgatgcaggattgatgatgccggcgcttaatccctggaacatggccatcgtataaaaattcgcattgatgatcggtcttcccggcagtccaaatgaaatattggaaacaccaagaaccgtattcacaccaagatcataccggactctgtgcagtgcttccagagtaatctttgccccttccggttctgagctgacggtcatggcaagtacatcgatcacaagatctttcttgtcaatgccatactttgccgcctcacggatgatcttctctgcgattgccacacggccgtctgccgtttctggaatcccgtcttcatccagcgtcagaccgatcactacaccgccgtatttttggatcagcgggaataccgcatccatggattcctgttttccactgactgaattcaccatcggttttccattgtagatccgcattgcctgttccatcgcctgaatatccacggtatcgatctgcagcggaagactggtcacactctgaagctctgtaatgacttctttcatcatcgatacttcatcaatatccggcaatcctacattcacatccagaatatgcgctccattatcctgctgcatgatcccttctttgaggatataatccagatcatgatctttgagcgcctgtttgaacttcttctttcccgtcggattgatccgttctccgatgatcctggatcccctaccaagcatcactgcctgtccgtaagaagatacgatcgtatgaacttttttctccggtgttttgatcaaaagatccttacactgtgcgatcattgcccggatgtgatccggtgtcgtaccacagcatccgccgatcacacaggctcctgtttctacgatcatttccatcgtctttgcaaactgctccggctctacatcataataagtctcaccatctcgctgtttcggaagtcctgcatttggcttgacaatcaccggaagagacgtatattccaaaatctcatgcaggatcggcatcatctgctcaggtcccatcccgcagttgatccccagtgcatccacgcgcagtccttccagaagtgcaactacagaaggtacatccgctccggtgagcagctttcctctctcatcaaaaatagtcgtcacaaacaccggaagggttgtattctctttcgctgcaagtaccgctgccttcaattcataggtgtcactcatcgtctcgatatggatcagatctgctccggcctgttctccatagatcatcacttccttgaaagcttcataagcggtctcaaattccagatcccccatgggctttaacagctttccggtagggccgatatccaacgcggtatacacttcccggttgtctctcaccccctgtttcgccgcttccttcacatgagaaaccgcagagaaaataatctcttttaaggaacagctctcatcgtgaaacttcaacgcatttgctccgaatgtattggtcaggacaatatcacttccggcttcaaaataactgcggtgaatctgacgcactgcctctgcatgcgtcagattccaagtctccggcaattctccgggaagaagcccctttgcctgaagcaaggttcccatcccaccgtcaaaaaataaaagttcttttcccaagcgttctaaaatcatatcgtatcccttctatattcacagtcctttttttcacaaatctcgcagccctgtatcggacaccgctctttgatacggctcattccgatcactgctgtcaccgattttgtcggagtcatcataaaactgtccgtcatggtcagtccgatcgtttttgcgcagtctaacatctgcatcaacggcttctgatactgaatatcaaaatctccatatcccggactgaacctcggacgcagataccagccttctttttcctgctgcttcgcaatttctctctgacacgcatcacagtattcctccagcatggccgctgcgcaggcctgaagcaccactgcttttgccatgtctgtcagagatgcccgcgtaatcagccggtctgctcctgttcccagtgtcgctccaaagagaatcagcttctcacattgttttaaatttctgcccagacttctgctcttcatccggatatttccaatctgaaagcactcctcgctctgatgctgtaaatcaaaaatacggcagatggattttggacttactgcagatctcagaccctcaaaagagtctttgatcaaagcaagtgtctgttcatctaccgcattccttccatagcccagataacggatagcttcttttgtcattctatccattactccgtctcctaacactgaatgatttctgaaatattatgcatgatagctgctgccacttccggtctgttcatcgaataaatgtggatattcttcactccgtttgccagcaggtcaatgatctggtcggtagcgtatgcaattcctgcctgttccatcgccttcggcgaatccccgaaccgatccaggattgcctgaaatctccttggaaatacggttccggacaactcacagcttcgtttcatctgtcttgcgcttgtgatcggcatgatccccggcaataccggaacagtgattcctgcttcacgaatacggtacaggaaattatagtggatatcattgtcaaaaaacatctgtgttgtcagaaaatccacaccactgtctaccttttgtttcagatacttgatatcatcttctttatgctcattctccacatgcccttccggataacacgcagctccgatacagaaatctccatgtctgcggatctcttctacgagttgataggcataatgaaaacgatcctcgctcggaaataccatatcttctgaaatatcaccccgcaatgccagaatgttctcaatcccctgttctttcaggctggcaataacgctgcgcacctcatcttttgtggaagaagcacacgtcagatgtgccaggctttctacgtgcagatcatgtttgatataggatgcgatctttgctgtgtttttgctggtaccgccgcctgccccgtaagtcacactgataaattccggctttaagcctgccatttcttctgctgcccgaattactttgtcatatcccgcatctgtctttggcggaaaaatctcaaaggaaatatgtatcccgtcttctctgagtctgtcaataatcttcatgcatttttctcctgtgtatattttgtctattctccaataagctctttgtacaatgtctcgtactgttttgcagaattcttccatgagaaatcctgttccatcgcacgctctacaatcttattccagtcccgctttttgtcataataaatatgctctgcataccggatcgtgccaagcatctcatgcgcgttgtaattggaaaagctgaatcccgtacctgtcttctcgaactcattgtaaggctctaccgtatccttgagcccgcctgtctcacgcacgatcggaagcgtgccgtaacgcagactcatcagctggctcaatccacatggttcaaacagagacggcatcagaaatgcatctgcagatgcatagatcttatgcgacatatcctctgaatagaaaatattggccgatactttattcgaatatttccatgcaaaatggcggaacatattctcatattttgcttccccggttcccagtactacaatctgtactgcatcctggcagagctcatccatcacataatcaatcagatcaaatcccttctgatcggtcagtctggacacaataccgagcatcatcaccttcggatccttgtccagtccaagctcctcctgcagagacagcttgttggaaaccttgttcttgcggaatgtatcgaccgtaaaacgttttgcgatccgtgtatccttaaatggacagtactcatcataatccagtccatttacaattccacaaaggtcattggatcttgcactcatcagaccatcgagaccttctccaaaaaacggtgtcttgatctcctgcgcgtatgtctgacttaccgttgtcactttatccgcatagacgataccgccttttaacagattggcatcccggtatgcctccagcttatccggagcaaagtaatactccggaagccctgtgatctgacgtacagtgctggtgtcccacacgccctggaatttcagattgtggatcgtcatgacactcttgattcctctgtaatattcacccagaaatctaaaattgtccagataaaccggaatcaagcctgtctgccagtcgtgacaatggatcagctccggacggaagtcgatcaccggcaggatactcagcacagcctttgagaaaaaggcgaatttctcgatattccatctcggatctccgtcatacggtgcaaatccattaaaataatactcgttatcaataaaataaaatgtgatcccgtcctgcacatatttcagaattcctacataacggtcttctcccgccagattcatataaaaatgatccatatattccagctggtccttccatttctggttcatacaggaatacttcggaagtaccacccgcacatcgtatttctttttgtcaaaatattttggaagtgaaccgacaacatctgccagtcctcctgttttgataaatggcacacattctgaagctgcaaataaaatgttcttcatagctttccctcccatttccctccgttttactaagccagtatttttctacattatactccatttcccgaagattgcaaaggtttctgtgtggtttatctgtgtttgtattccaactggatcgtatctgcgatcaatgccacgaattctgagttggtcggtttcccctttccggtactgaccgtataaccgaacagctcatccagtgtatccagttttccacgattccatgccacctcgatcgcatgacggattgcccgctccacgcggctggatgtcgtctgataccgttttgctacggttggatacagcacctttgtgatcgcatttaacacatccatatcctgcactgccatgatgatcgaatcccgcagataatgataccccttaatatgtgccggaattccgatctcatggagcaggtttgtcactctgttctccaaatccccttctctgatgtatggaacctgtgatgacagttcatcattcctcttttcgcagcttctcactggtcttctgactgtttttatccgatttaacagcatttcgttgttaaacggcttcatgatatagtaatttgcgcctcgattgaatgcatcttctgtaatccgctcctggccgactgctgtcactacgataaagtccggacgcttctgtacatttttatcctgattgatcttctccatcacagtcagaccatccattttcggcatgatcaggtccaataatacgacatccggctgcttatttcggatgatctgacacatttcttccccattttttgcttttcctacaacatgaagttctttgtccatgttgatgatttcctccagaagatccaaaatccgctcattatcgtcagcaatcgccacgtttacctgttccatagttcctctccctctgttcactgcctgaacttttaaacgccacgcttttcattatatctgccctatctgccaaaatgcaagaaaatcagggagaccttattcgacaaaactaggcagaaagattcgacaacatattatcaataaaaataccgtagccttttgccgaatcctgtacaaacacatgcgtaaccgctccgatcagctttccgttctgtaaaatcgggcttccgctcatcccctgtatgatgccgccggtcgcatcaagcagtctctgatctgtgatctcgatcaccagccctttgttgatttcctgtccggaatcgtcgatatctgtcaccaaaatgtcgtaattttctacttctccgttaacataacagcgaatcacagcttttcctttttgtatttctccccgctctgccaccggaaccatctcctgctgcaaaaacagtttttctgcggattcaatcgtcccgtaaatccccgcctccgtatttttatctatggttccaagacgattataatgactgtacacgatcattccttccatactccccggaattccgttctgtcccttttgaatcgaatgaatactggtcttataaagagtcccctgccgaatcgacaaaagcgcgcttgtatccatatcatgaatcccatgccccagcgctccaaaagctccgtctctggtcataaaggtaatcgtcccaagtccctgcacattgtctctcacccagattcccagcttatattcgtctggtttcgtttctacgggtttgaccgcaactgtcagctcctgctgccctcttcgcagtgtcagcgccacctgatcttcgtccagatcggataatttctggaacagttcttttttattttcaatcttttcatcattccatgccacaatgtaatctcccggccgcaccagattctctgcaggctgatactgttttccgtctgcgccggtgatctggtctgtaccaagtaccataacaccatccgtctccatgtaaatcccgaccggcatgccgcctggtatgacgccttcctccatgactgcctgggtactggcttctctgaccttttgtgtctccttttggggagacatcgcacagccggagagacacacaaggaacataagaacagctgccagttgcctatactttcttttcatctttgtcacatcctctctgccaaacgtaaaaaaacggacaccaaaaggtatccgttttagtatgtgacatttttttattttcacactggaattctatactctctttgccatttctttcatttcttttgcactgtccagaatatttttcgttatctgggcgccgccaagcagacgcgccagctcgcccacagaagcatcctcatccaacggaaaaatgcctgtttttgtcgtcgtctgatccgtctgcttttgaatcagatagtgggcatcggcagctgccgcaatctgcggaagatgggtgatacagatcacctgacgcttctgtccgatgatatgcagtttttctgccacctttccggctgtaattccactgatcccggagtcgatctcatcaaaaatcagtgttggcgtgtcttctttatctgccagcacagtcttgatcgccagaaggattctggagagttcacctcctgaaaccgtagttccaagcggctttggcggttctcccggattcacagaaataaaaaattccgcgtcatccattcccagagcagacatttttgcctcttgtaagaaacgcatttccagctgtacatccagaaaattaagatcctcaagcccggctttgatctcttttgtaaaggaaatagctgctttttttcgaatcttactcaacttttcggcacagctttgcatttccttttgcgccgcttcggtttgagaccgcagattttcaatataagtctcataatgctccagttcatttagtctctgccgtttttcctctgcgtattccaggatttcattgactgtatttccatattttgcctttaatcgattaatctcattgaggcggttctctgtctcataaaactcttcttctgaaaattcaaagcttttggcatactccgagagttcccggttaaaatcattgagcagactgtcaatctccaccagctggccatacagtgcagttcctttttcatcgaaatgttccacttcctgaagggaacggattgcacggcttaagaggtcgctggcgttgtttcggtcatcctcactggtgtactggtatgtctgagccaccgcactggtcagatctttactctgcgtcatcctctgatagagactttccagatcttcgtcttcccccatgcgtaaatgcgcgctttcaatctcatgcagttcatactccgtcagatcaatctctttgcgccgctccttctcttccattccagatgcttccagcctgcggctgtactcctgatatgcccggtaagccagggccatcttctgttttggcttttccacctgctctttggcatatacatccagaaacgtcaggtgattgcgcttatttaacaaacgctgatgttcatgctgctcgtgaatatcaatcaggagacttgccacatcccgcagtactcccatcgtcaccgtctctccattgatcttgctgacacttctgccttccatcaatttccggcttaagatcagcatcccgtcttccggaaagatatccatttcttccagctgacggatcaactcctgattttcaattgaaaacatcagttccacaagtccgaacctggcgccctttcgaagcatatccgcattgtatcttccgccgagtgccagatttacggaacctaagataatggatttaccggctcctgtctctcctgtgagaatattgagtcccggtccaaaatccacctccacctcgtcgatcagcgccagattttttacatgtaaattttgaagcatattttttcctatatcccttttgacacaatctttcgaatcttatccatcacatgttccgtatcctgtacgcttctgatcgcgcacatgatcgtatcgtcccctgcgatacaccctactacttctttccatttcatggcatctactgcggccgctaccgccattgccattccggaaacggtcttgatcaccagaatattctgcgccatatccatggaaatatatccgtctctgagcacacggatatatttttcattcatctcatccttttccggtgccagtaccacatatttctgtctggagccgtccactgccacttttgtaagccgcagatcgcggatatctctggatacggtagcctgagtcaccttaaatccctctctgttcaaatattctgccagttcttcctgtgtttcaatgtcatgttgtgcgatcagttcaataatttttgcatgacggcttactttcattgtattagtttcctttcatcttttttctcattgtcttcataaagctctcttcactaagttttgcaagtcttgtcacatgatctgatcttttgatcgtgacacggtctccagtaccaaggcggagcatatctgccccgtcaaacgtcaccagtgcctgctcgtcttttccatatcgtccctggctgatcacaatctcgatcgtatcttccgccgaaagcacgatactgctggtattcagcgcatgagaacagatcggcgtaatcacaaacatactggctgtcggttctacaaccggtccgcctgctgacagattatagcctgtcgttcctgtcggagtggagatgatcacaccgtcagccatatagctgttgagcaacgttccgtttacataaacatcaaagtgaacgatccgaagacttccatctctggtgatcacgatgtcgttgactgctacattctgataactgctgttaccggaaacctcaccggaaagcatcatccgctcctcaaatcccacttgatttttaaacaatcgctccagcgcatatgaaaaatccgaccgttccacttctgccagaaatccaagcgtccccagattgatcccgatcagcggaaattcatattctgcaagctctcttgccgcacggatcagtgttccgtcaccgcccagcacgatcccgcagtccacattctccggcacagttccgggaaaaataaacccctgctcatcttcttttgccagaatacactctctgccatgctgttctatatatttctgaatctcctttgtaatcccataatccggatctttcatcagatttgtaataatataaaaacgctccataccacacctcttattttgcaagtgtctcaaatgcccggtccacaaccagactcaaatcttccaagagtgcatcctccaccggattcggccattttttcagatggatcagatattcaatatttccctccggtcctttgatcggtgaaaaatcaatattcaaaatcttaaatccgatggactgtgcatacagcgctactttctcaatcacttcatggtgggtactcttctcgcggactaccccttttttgccgactttttctctgcccgcctcaaactgcggcttgatgagcgccacgatctcaccgtcttccttcaggtaattccggatcggctccagcacttttgtcagcgaaataaaggaaacatcaatggaagaaaaatcaatcggttctcccagatcttcgggcactacataacggatattggtcttctccatacacacaacccgctcatcctgtctgagtttccagtccagctgtcctcttcccacatcgatcgcaaatacctttctggcgccgttttgaagcatacaatccgtaaatccgccggtggatgaacccacatctgtacagacttttccatccacactgacgtcaaagttggcaatcgccttttccagcttcaatccgcccctgctcacataagggagcacatgaccgcgcacttcaatctgcaccgtatccggaaatgtcgttccggctttgtcctctctttgtccttctacaaacacatttcctgccataatgacagcttttgccttttctctggactctgccagatttctttttacaagcaatacatctaatcgttctttcatgtcaatctttccctatcgtcacataatctgcaataatctgttttacaatcgtctccgcatccagtccgacttccctgcgcagcaagtctacattgccgtgttctacataatcatccggaattccgatgcacctgacacctacatccagctttgctctcgatacatagtgaagtacctgttctccaaatccgccggacaatacattttcttcaatcgtcacaaaaagtctgtgatcctttgtcagagtttccagcatctctgtatccagaggctttacaaatctggcattgatcagtgagcaatgatatccgatctctttcagtctgtcacgcacctgaactgccagctctgccatgtgccccacaaagatcaccgcaatatcctcctcttcataaagaatctcactttttccatagacgatcggagtacgaaacgccgacaatccctcgtaagcggcgcctcttggataacgcagtgccaccggatactggaaatctgcacaaaaccgcaccatatccgccatctcccacctgtttttcggtgaaaggatcgtcatattagggatcatattcagaaatgacagatcgaaaagtccctgatgtgtctctccgtcactgcccaccagaccggctctgtccactgcgatcatcaccggcaggttctgcaggcacacatcatgaatcgcctggtcaaacgcccgctgcaaaaacgaggaatacaccgcaacaaccggctttaatccccctgctgccagccctgctgcaaaggtcagcgcatgctcttctgcaatcccgacatcaaagaaccggtccggaaacatccttgcaaatctggcaagtccggttccatccgccatggctgctgtaattccgactactgcatcattttgctttgcaatatcacagaatactttggaaaaaatatcggtatagctgtccttagagctcttctcttttgcctccccggtctcaatgtcaaacggaacgatcccatgaaatctggatggattctcctccgcaggaccgtatccctttcctttcttggtgagtacatgaaccagaactgcatgatctacccgcttcgcctcctgaaatgtcttatacagctttcggatatcatgcccgtccaccggtcccaggtaggtgattcccatatcctcgaaaaacatacccggaacaaataattgcttgagtccgcttttcgtctttttcatctggtacaggatcttctcaccctgtaccggaatcttcatcaaggtatcctcaacaccctttttcagtcccgtatatgcctctgccgtgcgcagtccgttcaaatatctggacatcccgcccacattttcagaaattgacatattgttgtcattcaatacaatgataaaattgctttttaaacgggacgcattgttcagtgcctcatatgccatccctccggtcatggctccatctccgatgatggagatcacgctgtgctcttcccccttaatatctctcgccgccacgtacccgaggcctgcggaaatagaggtggagctgtgtccggtatcaaatgcgtcacattcactttcctttcgctttggaaatccgctcatgccgccatattttctcagatcgtcaaatccggcgcgccgtcctgtcagaatcttgtgtgtgtaggactgatgtcccacatcccagatcatcttatcctgcggcagttcaaacgccagatgcagcgccatcgtaagctccaccacaccgagattcgatgccagatgcccgcctgtgacactgattttctccacaagaaactgacggatttcttctgccagcttttccagctcctccggctttaactgtttgatatcattttctttttgaatcttttctaatagcataaggtatgcccccttatttttccctgtatatcaatgactccagcaaaatctccagataatcatctgttggattcagcgctcttacgtctgagatggcttttctggacaaatgctccacctcctgtttggccacatccagccctttccacacaacatacgtcattttttcatttttctcatcgctgtgcaccggttttccgagcacttcagtggtactgatcacatccagaatatcatcctggatctgaaaagccattcccacttttgctgcaatctcttccactgcctgtacacactcatcgtccgctcctgccagaactgctccgatcatcatggaagcctcgatcagagctcctgtttttaaacggtagataaactccagcttctctccgtcaattttcttaccggaagattttacatccaccacctgaccgccgatcattccgtagatccctgctttttgtccaaggatacggattgcttttccaatcagaagactcttctctggcgccatctcaaatgccgatgccgctgtctcaaatgcataattgagaagcgcatcccctgtcaggattcccatatcttccccatataccacatgggtcgtctttcgtcccctgcgatactcatcattatccatggcaggcaggtcatcatgaacaagggaataggtatggatcatctcaatggcagccataaacggctcaatcaccctgtccgttccgccaaacatccggtatgtctcctgcatcagcattgggcgcagacgctttccccctgccagcatactgtagctcatggcatccatgatcacttcctgatacccctgcaccctgggcagatatgcttttaaaatctgttcgatctgtgctgtttttcctttttgtatctccttaaaactcatgaacttctccattctcgtccagaacctgaactttcttttctactgcgtcaatggtctcattacactgctttaacagctgcattccctcattatataatgcaaaagactcttccagagtaatgtctgacttttccatgtcagctgtcacttcttccagtcttgcaaacaatttctccagaccgggtgtattctgttcctgattttccatgtctgcctcctttatgcgtgatattggatttcttctgtcattccttttacctgcgcttcgatcattccgtccgatacataaatacggatcgcatctccttcttttacctctgcaatctgccgcaccgggcggcctttctcatcttctatataagcatatccctggttcagcttttccagcggggataatcccttcatcttttccacataaagagcaaactggtgtctcttttgctgaaggatctcttccatccggctgcgcagctgcaactccagatctgaagcatactgcctgttctcaaggagtttctgccttgggtgaaacagccgcagtttcagtgccgcctgtttcaaatactgacggttctgttccgcctttttcaaaaccgcactgctcaaacgcatctgatattccttcatcagattctctgcagcctgatattcgtacaccgcaagctctgcagccgccgaaggagtcggagcccgaagatccgccacataatccgcgatcgtcgtatccgtctcatgccctactgcggaaatcacaggcacccggctctcaaaaatcgcacgcgcaacgatctcttcattgaatgcccacagatcctcgattgatccgcctccgcgtcccacgatcataacgtccacatcttgttcttccagcatccggattccctgcacgatactttccgctgcgccttccccctgcaccttggcaggacagaggatcagctgtacatacggatttcttctggcggcaatattgatgatatcccgcaccgcagctcccgaagatgcagtcacgatcccgactttttttacaaactgcggaatcggtcgcttgtactcctgtgcgaacatccccatctcttccagctctttttttaacgcttcaaactttaagtacagctctcctgctccgtccagaatgatctctctggcatacatctggtatctgccatccctatcatagacactgaccgagccgagaacaaccacctgctgtccttcctgcatacgaaaagaaagccctgaccgtgagcctgcgaacatcacgcagtctatcgtgccggactcatcttttaatgaaaaatatatatgccctgatggatgatatttacagttggacacttcccctttgacgtacagccggttcagcataaaatcctgtgtaaacatattcttgatataggcattgacctgttttactgtgtagacattcttcaacatctgtccgccccgccatctttaatctgcaatcttggcaagtactccgtttacgaatgcaggaccttcttccccgctgaatttcttcgcaagttccactgcctcattgattgcaacttttacaggaacatcatcatcccacttgatctcataaaccgcaagtctgaggatcgccagatcgaccttgttcattctggaggttttccatcctgttgctttttcattcaaaatcgcatcgatctcttccagcttttcgatcactgcttccagctttttctgtatgtactctttatccttctcttttgcgcttgtcagctcttcaaagtacaattccagatgctttggcatctcttctaatgtattaaattcaatctggaacaacatcttaaaaatgtgctctcgaagttctgttcttaccatatcggctccttccgtcccttatgcttctttcgtccatatttctttttgcagggcttttgctttttctaaaacagaaaaaggatgtcctgcgacatcctttattatactacagctgtcctgtcttttgcaatgaatttctattttgcagactcctgactctccatctccacgcctgccactttcacattgacatccgcaacttccagtcctgtcatattctccacagcgctctttactttttcctgtaccttggcagatacatccatgatgctgtaattatacttcatattcaacgccaacgataccgtcacaacgccttccagcacgtctactttcacacctttggaaagattcttcattcccagtctgctgatcagctcgttggtgatattgcctgccatagatgccacaccttctacctctgtagcggcaagtgctgcgataatcgcaaccacttcatctgctatttttacttctcccatgctggagtcatcctgtattgtataaatatttctttcgtcctttgccatgataagaccctcctgtttgtgtctactgtttgcgctaatcttcttttcatattatatcagacatgccctgcattgacaagggtcatgagcgcccgaattctgacaggatcagcccttcgttccgctcctgtgtcatccggatgctccactcatgtgtaaagagaagcagcggtctgtctttgagatccttgatcttcttcatgtccgaagttccgaccagacggttcatatcgatctcttcattttcgatccagcggatatactcatacggcagattttccagacgaatctccaccttgtattcattttccaggcggtatttgagcacatcaaactgaaggacaccgactactcctactataatctcctccatacctgtattatattcctggaagatctggatcgcaccctcctgcgcaatctggttgattcccttaacgaactgttttctcttcatcgtatccacctgacgcactctggcaaaatgctccggcgcaaaggtcgggattccttcatatacaaaccgctcctttgaagttgtcagcgtgtcaccaatcgaaaagatacccggatcaaatactccgatgatatctccgccataggctttgtcaatcatttttctctcgcttgccatcatctgctgcggctgggaaaggcgtacttctctgcccccctggatatgatacacattcatcccggcttcaaactcaccggaacagatccgcataaacgcgatcctgtcacggtgtgctttattcatattggcctggattttaaatacaaatgccgaaaaatctttttccttcatcgggtcgatcggtccctgatctgacattctcggaagaggagacgatgtcattgcaaggaaatgctgcaaaaatgtctccactccgaagttggtcagtgcagaaccgaaaaataccggagaaagttctcctttgctcaccagctcctgatcaaactccgcagccgctccgtctaaaagctcaatctcttcttccagtgtcacttttgcttctgtaccgatcagccagtcgatctccgggttgttgatatctacctttttgacttctcccacagaagttccttttttcgtatccgagaacagctcgacctcctgcttctgacggtcgaacactcctttgaattcttttccggagccgatcggccagttcaccgggcaggttgcaatccccagctctttttcgatctcgtcaagaagatcgaatgtatccttggcttcccggtccattttgttgataaatgtaaaaatcggaatatggcgcatcacacagactttaaataattttctcgtctgggcctccacacccttggaggcatcaatgaccatcaccgcagagtctgcagccatcagtgtacggtaggtatcctccgagaaatcctgatgtcccggtgtatccagaatattgatgcaatatccgccgtaattaaactgcagcacagacgatgtaactgagatacctctctccttttcaatctccatccagtcggaaaccgcatgctttgcggtcgcctttccctttacggaacctgcctgattgattgctcctccatataaaagaaacttctccgtcaatgtcgtcttaccggcatccggatgggatataatggcaaatgtccttcgtttttctatctcctttgtaatatctgacatcttacttcttctcctgttctataaaacttcacatgtccttttagtgtatcacaagcatttctctgccgcaatccaaatttctttatttttcggcttctgcagtctcatggatcggtgtgatgacgatcttttccggagcaatgtttgtttttctggtcacgatatcctcgatctgggcacgatttgcatctgttaattccgctgcattcaccacaatatccgcagaatcagcggtcagactgacaacagattcagaaaagcctttcgatgccatcaatgtctccaccgccacttcctgctctgaaagctgtgtcatctgcagcatctgtgcgatcgcatccttcttttcttcttcactgatattcgcgttgtcaatgatcgcctggagcgtttctttgttctgcgaacgcatctgttctctggcaacttttgcctgcgctacggtattttccgcctcaccgctggtcaaaacagcctcccccggtgtcccctccacttcggaatcattgcttgcaatctctccgtctgtctccagatcttctgccgagatatccaaaagttcctgattggcggttccggcactcgcctcttttgccccatcttcttttgctccgaacaggcgtcctgaatagttcagatatcctgcgatcgcgatcatcaccgccagcgctgtaataatgatctggtttttcttaaataatcgtttcaaaatcatatcctcctctttttccttctgttttatgcatttgtccgtttcattattttaatcttatgcgcctccactccgaataatgcctgcactgcctctgtcagattttttaccacgaccggatcatctcctccatcagctgcaatcaccattccctcaatctccggcgccatttccttactcacataaggcgtctgtgtcccatcggatttctgctcataaatactggtatgactcagcgaacgatcttctgaaaccctgctccctcctttactgtcttcctctgtgatttcattttcttccctctggctgtccttttccaccactttctcttccgaagatttcaaggtgagcatcacctttactttcccgactccctccacgcattccagggtatcttccacccttttttccagcaatctttcatactgttgttctgtcgcctctcccccttctgtttccgtttcttcctgtcccgcccctgtcccgatttccggatctttctgatccggaaccggggaaacgaccaccaccagcaggattcctgccaaaagcaggatcaaaagctgctgttttgccggcagttttcctttttttccaaatccggaaatccactgcttccatttattctccaatctgaatctcctccacttcaatctgctccttttcttccgtctccagggtcatctctccctttccttcttcctgcttctcccggatttcttccaaaaaagaagcgctctcctgttccatgttctgttcctgtacccgacttctaaaactgtcctccatatcggtcagccttaacagcggagtcatcagaagaatgatcagtaccagtccggaaaagaaccggatatatttttggtacaattcctgtggaagtgcctgcaaaatggcgctgacaagaatcagatagaccgccagatcctgaagccactgacagagttctttcaaggtcttctccctccttttacgtggcagaagccgcgaccacagcgatggtcagcaaaaacaaaatccctgtagtcgccattactttcacaagcatttcatacccctcactgacccctccgatacatgctgtaattcgtttgtccgatatcggctgtgtcaccgccgccactgttttatacaaaaacgccagaagaagaagcttcacgatcgggataatgcagatacccgctgcgatcaccgcgcctgccattccaatcccgttttttatcagaactgccgttccaagtacgacatccatcacggaacctgccatgtttccaagtcccggtatcgcctccactgtttttgtaacaaaacttcgtttcagggagtccaatgcaggagaaaggattccctgtacgacattgatcccgatcacacacgccagcatggtctttagcgtccagcccgtcagtttttccagaagctcagcaaactgcgacaaaaattcttctccggtaagattgcccatcacctggatcatcatatatacattgacgagaggcaccagaaaattcaggattactgcctccgccagaaagatcagaaatagtaccacttcaaagaaaaacatggatgtcacacttccagaggctgctgtaactgctaaaaaatacgtcggacaaagcaccttcataaattccagcaggaagtttaacgaagcctccatctcggatactgccaatcgaaacccgttcagacaaagtgcgataagcagcatataaagaatataaaacgcaatctctgaagcctgacgttctccgaaggcgccggaaaaatttgcaaacaccgcagcaatcactgcgatcaaaatcagatataccagaagtttccggtgtgtctgcagttcatagaaaaactgatcgaaaagaaagcctgtaaactgctcccccgcttttttcaaatcacctgacacaagcgtctccacaacatcccggaaggtcattttttcccgtgggaacatctttttcagactgtcatcgagatctgaaaaatcaaattcatccaacagctcttcctgtgtgatctgcaggctttcttcctcttctgcagcatacgctgtatgtaccgccccaaacaggcacaggctcaaaaagagaatgccgaatatcccatattttctcataacagaaactcctgaattgtttccaaaagggcaagaaggaccggcatccccaccacaaggatcgccagcttgccaaatatctcgatctgcgctgcaatcgcctgatacccggcatctttgcagattccggaagaaaactgtgcaatgtacgtgatgccgaccattttgagcatgatggcaatatattccgtatcaagagtcagaaagctttgaatctgttccactgcccgaataaacacttccagttttcccacaatgcagaaaaaaagaaagatgcctgccgccagatttatcagaaatccgtactccgctcttcctcctttgagctgaattgccagaagaaccgccaccatcgcgatcagactgacctgcaatacactcatatccgcctccctcttcacagtgaaaacaggcgcttcatggacgcaaacaactcataaatatatgggagcacccaggacaataccagaatcagacctgcaaagcttgtcagaaacgcctgttcttcccttccgctgtgttttaatacctggctcaaaatagaaaccagaatgccgactgcggcaattttaaaaataacaccgatcgtcatgaattcctcctgtctgatttcccggcaaaattcttcttaaaataatacgatcaccagaaacaatccgctcatcacgccgagccagtttccgattctcttttttgccgtgatctcctgccgggtttcttcgatttctgcccccagattctcaagatacatctgcatacttgttctgcctgtcctcacatccatctgtccaagatacatccccacctccgaaagttctctcatatgcctgctcttaagatgaagctcctttaattttgtttccgtgcacgcctcccagatcccccgaaaactctgcccgcctcttgcctccacccttcttttgagatccagcatccagctgcgataaggctcctgcacccggtttgcagtttttccaaaaacctcaaaaagaggtgcgccgctgtattcgatttctccctggatcagttccagaatatggcggatgtacatcagtttttccagatactgctgctgttccacgccatataaaaatccccctgccgtggttgacaaaagaatcagaatgcagccgatcagtttctgcataaaagactcccccgctcatcgaaaatctctttgatttctcccggatgttctctgttctccagtaccacatagcgctcaaagcgccgctgtctcaccagttcccccagtcccggcttggacgcgatctctgccatcgaattcccatgtacactggcgatcagcttacagccgcactgcatagcatactctacggcacgaatctcctcctgtgccccaatctcatccacagccagaactcttggggacatcgatcggatcagcatgatcatgccctctgcttttggacagcaatccagaatgtccgtcctgctccccagatgattctgtgccactcccagataacaccctccgatctcggagcgttcatccacaacccctaccgtgcatcctttcacatgcgcattcccgtctgaaatctgccggatcaaatcccggatcagcgttgtctttccaccacatggcggagagatgatcagtgtatgacatacctctctgttctttgtgatcatcggaagcagcctgtccgcacatccgggaatttcatgtgacatccggatatttacagacgagatatgctgcagacttttcaccttttcctgttctaatattgcttttcctgccacccccacacgatgtcctccttccactgtcagaaatccctgccggatttcattttcatacgcataaagggaataatgactgctgtattccagcgtctcctttatctcttcttttgtcaccatatgctttttcgcccgtcctgcaggcaaaaataattcttctccctgatacaggatcagaagcggctgatctgttcgcagccggatctcctggagctttccatagtccaggtgcgcttcctccatcaccttgcggattccggccgccagaatgtgaaggatctgctgttttcttctctcttcattcatcttgtccacctctttatcccatgtatatgagagaagtgaaagtttattcctgtgggtttgaaaaatttttaagtttacaggtttaccggctattcagaattgggataacgggaaagttttgggggcagatgcaactcgtgcgagtcacatctgccccctatttagaacgatctatttcccgacagccccaaatatgtattttctattgttcttctttgcccgctgccctctcttctcccatctctcggatcatttgtgcaataacatcttcctcttcttcaagttcctctgaaatctcagaaatagattttccttttaccagtttcttttgaatcagcctttctaaaagctcctgttttccctttttaattcccgcttcccgctcctgccgcatatgcttttcctcatcatattcataaatactcacttatttcgcctccgctctgttttgtttcaaaaactctgaaagaattccttcctgaatacactcactgattgcctgttccactgcttcttccaccggctttacctgagcgtactcccgcactcttgcagtatattccgagtaatccttcagagatttgcacatttccttcaacttttcattatgcccgcggttgatattcagcatcaccgcagtcagctccaatgccggatgttcttctttgacgcaatatgcatcagacaatcttaaaatttttcgatccggctgttcctgacttccattgtaaaagattacaaactgcggagtcgggatctgaatccttttcgtaccatacaggttttcatcttttgtcatcccggaatacagatccgagatataaaacaaataccgcaggggcaggttgggactgtaggtggactgatgctcatatagggaaagtctggaatcaatgagaaaggacagatcattatgcatcgacatgtagattgcattttccagtgtattgatttccagcaattccggatcttcataatgttttccgctgaccgcattgtacagatcgagcagatctttcctgtcactgtagagcatggcaaaaatcctcgatttgtacagtctgtttacgggctgcatctgtgttgtctggttcatataaatacctccttgaatgaaaatagctgcaggaggctttccaatacggcatctttctctcaaacctctctgctgttttagattgaaatcaaagcatagagatcttccgatatgctataagaataaaagatgcggtatcgttccgcttagaaaaccagaattttatgcttttctgcattataacatgattatttaaaaagagaaagttgaaattcatttttccccttgaaaactccatcgtttcttattacgtaaaagaggctgacgggaaatagattgaaccgccacgatactaagtctttgtggcgctgatacgctttcccttgtatttgtagaatgtcataaatgctccttcaaatcggaatttcttagcgaatcacttgatagcgcaaccttagatttttgaccccaccctctctatgtgatatagtattctcaaatccatgataccatacagtatcggacgaagttcacccgccgcgggcatgtattacgggatgcccggatgggtatacaacaaatgaaaggggtagacaaactatgaagttcgtatttttagatgtaaaaacaattggcgacgacattgatctgtccagatttgatctgtttggagaagttgtgaaatatcctttttccacccaacaggaagtgcctgaacgcattcaggatgcagatgtgatcattgtaaataaaattcaggtgaatgaagcctccatcggcgctgccagaaatctcaaattggtctgtgtcactgccaccggcacaaacaatctggacaaggaatatttagacaaacgcgggattgcgtggagaaatgttgccggatactctaccgaatcagttgcccagcatacttttgccatgttgttctatcttctggaacatctgcgatattacgatgactatgtcaaagatgaccactacacaaatgacaccattttcactcattttgcccagaccttctacgaattaaaaggaaaaatctggggcattatcggacttggaaatatcggacgaagagtagctgcgattgcagaagcttttggtgcgcaagtcatctatgcttccccatccggtgcagcgcctcaggaaggctaccatcaggtttctcttgatacacttcttgaaacttccgatattgtctctgtacatgcacctttgaatgaacatacagaacatcttatgaacttgaatgccttttgtaagatgaaaaaaagcgcgatcttcttaaatctgggacgtggtccgattgttgtggaagcagatttaaaaaccgcactggaaacaaatgaaatacaagctgccggtctggacgttctgtgtgcagaacctatgtccgaagacaatccgcttcgcggcttcacggacagcaaccggcttcttatcacacctcacatcgcatgggcaagcattgaagccagaacaaaacttatgaacatcattgctggacaaatccaggagttcttcggactgtaacgcctgacaatataagctgtaacgcattttatctttatgataacacgttacagcttttctcttttcagcttacactctccctgctattttcgggcgtcatttttctcaaaacaccccactacatcaaatctttcgtctccgcatgacacacaaaaagtaccgcaaaaacaaccgatattcctgttaagattacaggaaaaaccagattatctttcagcgtaaaatcaccgatattcgcctgtgtcaaaaaaatcagaaagaatgacgaaatgatcgttgctttggatgatttcattgccagaccgataaacagcgcaataaaactcatacttacaatcacaatcgatttcagaataagctgcacataaaatgacgcacttgccatgttaaaatcaagcaaaaatgcagatttcataaaaagtgagccgataagaacacagccataaatcagcaattttgtcaaaatcagtgcaataaaattgaaaatccatactgccagcatctgtgacactaatattttctgccgtctgatcggataggaaaacatcagattcatggttttatttttatacgctgtgacaataaacgaagccagcatcaccccggtaaatactaaaaaagccatccccgtaaacagttcaatggaagacgaaatcatctcatttcccggtgcagcatccggcattccggtgtccggatcatttgcaattcccagataagccaatgcaaacagaaacgtgcagaggataatcgcaagaatcacagcatttctaatgtacttaccgatgttgttctttttccattccagtctgatcaattttaacatctcacatcaccccctgtcagtttgaggaaatattcttccagtgattctgactttgttccaatcgcagtcatttccacatcgtgtaatgccagcgcctttgacaattcttgcaccgatatattcccgtcataaattcggatgattctatcttctacaatcttaaagttgtcaatccctatcttatccgacagtacatacgaagcctttcttgtatccacaacattcaattcaatataggcaagacttctttccgtaatttcctgcatcgcgatttcctgaacgagaacaccgcggttgatcactccgatcgtatctgcaatactctcgatctctgaaagaatatgactggacacaataatcgtaatgtcgtattccgtacaaagcatccgcagtaaatcccgaatctgtttgattcctgccggatcaagaccattagtcggttcatccaaaatcaaaagttccggcttacacaacaccgctcgtgcaagtcctaatcgctgtttcattcccagagaatactcgcgtactgattttttccctgtattgttcaagcctaatagctccatggcattttcaatacttcctgtattgtaatatcccatgtattcacaatgaagcgcaagattctctctgccacttaaatgctcataaaaagtaggaaattcaatcatgcaccccatccgcttaagtacctcatacgaagtcgatgtcagtttctctccaaacagctcgatgcttccttctgtcggtttccagagatttgtcaacagcttcataaccgtcgtttttcctgctccgttaggacccagaaatccatagatttctccttttttcacatgcatggacacattcgtcacaagatttttttctccaatggtttttgtaagtttgtttgtctgtacaacatatgtcatatcgtctgcctcctttctgatcaccattctagcaaatgagaatttcaaaactcttgacgaattcttacgaatttctttctttcacttaaaatgcaaagaatctgtctcagaagaaacacttatgcaattttaccgtgaatgtagtttttacattcggttcactctccaacacaatctctccaccgagctgctgtgcaagagtctgcgcgatcgtaagccccagaccattcccctgaatccttctgtttctggaatcctccattgtaaacaatcgctcaaatacattccctgcaaattctttctctatcccttttcctttatcaatcacatcaatataaacatcatttttcaccgatctgagaacaagtcccaaataccgcccatccaagccataccggatcacattggaaataagattatataaaatacgatgaagcgcctctttattccccataataaacactgcttcctccggaatttttacttcaacctgaaactctttttgtttcagcaattcataaaagtccaggatattctcgcggcagacttcacagatatttatccttgaaatctccagttccatatctcctgcttccagcttcgcaagtgtaaaaaactgattgatcagttccatgactctctttgccttctgttctactttcagaagcatttcatcctccttgtcaccatttatccgcataatctccagatagcctaatatgactgtcatcggagtcttgatatcatgcgaaatgttggacagcatcttttttgctgaaatctgtgaacggcgataatccactttcatttttctttgattttccagcaaacggttgatctgtaccagtagttccatgagagcttgttcatctgtgaacatcataatattctcatcgctgtccgtatcttgtattttttccagcttttgactgatttcttttaattgcttctgtattcctcttcgaaaaacaaactgttgataaactacaatacaaatcagcactgcaatacagatgcacaggaaaaataaaattatctcattattcatgacagatctcccagcttatatccgattccccataccgtaatgatatatttcggagatctcggatgctcttctattttgttccgcagcctgctgatatgaacattgaccgcattttcatctcctgaataggcatcattccatatcagagaatacatctgttctttggtatatactttttggggattctgaacgagcaacttcaaaatttcaaactcttttgccgtcagatctatttttgtcccatttttctccactgtataattcgtcagatttatagtaagatctcccatcatcaagacttcttgctcttccggctttgaatattgggtacttcttctgatatttgccttaatacgagccaatacttctgttactgaaaatggtttcgtaatataatcatcggctccaagacccagccccagcgtcttatctgcatccgtatctttcgcagatacaataatgatgggaactgtactgtgcgttcgaatatgctgcatcacttccataccgctgattttcggtatcatcaagtccaacaatacaagactgtaggattccttctcaaacttctcacaggcttcctccccatcaaccgcacaaatcacctcatagttttctgcttccagatagcttttgagcatctggctgatttctatatcatcttccaccaataacaacttcataactgccctcccaaacttcgtttcatacttttgtctgatgtcgatattttaccatagacacacatttttcgaaaggtaaaaacagattgcaagttgctatgacatttaaaccttaaaaaggcgaccatgtttccaacctttcgttgtccgcatagtcgccttataaatcattctctctattctcttatcttctgatattgaatgcctggattccaggatataccgcactctcacccagttcttcctcaatccgaagcagctggttatattttgccacacgttcggagcggcttggtgctcctgttttaatctggcaagtatttaatgccacggccagatccgcaatggtggtatcttctgtttcaccggaacgatgagaagatactgcggtgtaacctgccttatgagccatcttgattgcttcaagtgtctcggatacagaaccgatctgatttaatttgatcagaatgcagtttccgcagcctgattcaattcctttttgtaatctttctgtgttcgtaacaaataaatcgtcacctacaagctgtacccggtcgccaagttcttttgtcagcttctgccagccttcccagtcttcttcatccagcgcatcttcaatcgaaatgatcggatatttgtccaccagctgtttccagtgctcgatcagttcctcggaggtaaatctggttcctgccttaggaaggatatactccccttttgcagttcctttccattcactggatgctgcatccatggcaatcataaaatctctgcccggttcgtatcctgcgctttggattgcttccaatatatactggattgcctcttcatcactcgcaagatccggtgcaaatcctccttcatcgccgacagaagtcgcaagcccttttgatttcagcagtgcagccagtgcgtggaatacttctgcgcaccaacggagcgcttctttgaagctttctgctccaacaggcataatcataaattcctgaacatctacggtatttgccgcatgtgcgccgccatttaaaatattcatcatcggaacaggaagtctgtttccggaaacaccgccaaggaaacgatataatggaagctccagggactgtgccgctgctcttgccgctgcaatcgaaactgccaggatcgcatttgcgccaagttttgacttgtcttttgtgccatctgcacggatcatcgcctgatccactgcatagatatcagatgcatccattcctgcgattgtctctgcaatgaccgtatttatattttcaactgcctttgtgacaccctttccaagatatcttgctttatctccgtctcttaattccaatgcttcaaattcacctgtagatgctccgctcggcgctgttcctcttgccactgtaccgtctgctaaggtgatttctgcttctactgtaggatttcctctggaatctaagatttctcttccgactactttttcaatttctaaataattcatagattcgtctctccttttatcacacattctcccttaaagatgtcccgcaggcgataccgcctttggggacatcctgctatgccgcattcagcagttacgacatggaaagggctttacatgatttattctcagttagttatcgctaaccttgaattcaatataacacatccgtattatgaaatcaacatttttattgagaattattttcatttatcattcttctgtaaacagatatccggaaaaatcatatttatataccctgtaaatatagtatttcgagagattcatctagaactgttttaccagtgttccatcttccttgtattctccgatcagtccctacatcccggaatctacgagaatcgtatcctcacattcctgcacactgcttacatatccggaaaacggaacttcaaaagactgcaccagagtataggttcctgcattttcatccactttatatttataatagtaggaagtagttcccgaagagaggtctgttgcgatctggtcgatctgactccagtcataatccggtctggactcactgtatcctaaattgttgttaaacagatacagataatactgtccgtcaggcagtgaatcatctgtcacgtaagtcaccgtatgctgcccgccggcactggaaaagcttccgttactctcatctttcgtaagcagaagattctcatatcctgttccttcccagaaactctcttctccgatcatatatgcgatttcgggtgcagtattcagattctggattttcaaaatagtagatgtttctctggaactcaataaaatggaatcttctcccatccactgaatggtattgatatgtacccagtccagatcctcctgatccattcccagactttctttataatctccaagcagatcctccaaatctaaaatacaggagacttcacctgtggaaggattgagtcttaatacacagtcctctaccgtctgtttcccggtatctgttgccagaatcagaagatttccgtcatcatcaaaaacataatcatggtgcagttgatagtttcccagatcatagacttgctccaccatacccagttcattcactgctgcaatttttgtctcggaaatactgtaatacatccgatcattctcaaataccagccgatggcttcgatatccgatcagcggaacttctccgctgatcgttccattttcatcataatagtacataaaatcgacatcatcactgtcatttccaaggatgacatacaagccggaatccggaagcgaaatctggctgcttacatctgtctgacctgctgtctgcttcagctgtacctcttcttctcctgcaagacttcccattttgtatttgcaggaagcagtggttatggttccgtcttctgcttccggcgtaaaggtgatcgtattttccatatccggaatgagacctatgacctgaaattcatgttctgtggtataagtctcttcctgattgacttttcctccaaaatctgcaatttcgctatcgggcacagaaacaacataggagacagaaaccggttcttctgttgcaaaatagacataaagagacagcgtatttgttccaaacggattttgttccaccagcattttctctgttgtatacgttcctgattcctttgctgtttccagccgtttttttactgcctcctgatactctgtcgtataaatttctttaatctgttctttctttctggatgtttcctctgctgcttttgcttccgcctgtcttgcctgatactttgtaaatcccaggactccaatcactgcagccgcagcaagaaaaatcccaagcactgctcttttgatccatttcatacgttctatcctctcttttatatacagacattctctttaagctacagacgatacacttcatctgccgcggcggctacctcttttgaatgtgtcacaagaattacacaccgtccatcctcatgtgccagattcaggaagattttcataatttcattctgtgtatccggatccaggtttccggtcggctcgtctgccaccagaatctgcggactgtacgacagtgcccttgcgatcgcaactctctgctgctgcccgccggaaagctttaagatccggcgatctgcctccttttgtccaagcgctacttttttcaggacttcatccgcatgtgcttttttgtcttcacatggataccccgcaatatccatggaaagaatcacattttctctggctgtcagtttcggcagcagattaaaactctgaaagatcacgccgatatcatggctgcgataatcataccggtttaaagaagagatatcctttccgtttagcaggatactcccggaagtcggagtcgcaagcccgcagatcagggagaggagagaaaaaaacaatttttatcgcagacagaggatatgaaacatataatatttttgcgcatgtccaagaaaaaggaatgtattatctgattcgtgtaaaggatggcggtgggggaagcatgacaggaagttttgaccttcctgatgaaaatgagtttgaccacgacatgcaacttatattaacccgaaaacagacaaaagatgtgaaagctaaacccaaaaaatttaaatttattgcaaaatccagtccatttgactatctggatttatatgacaaaaaattttatacgttgaattttagagtagtaaggtttgccatttcagaagattcgtatgaaagtataattaccaatcttccaaaggaagattttccagtagaagaaataaagaaggtttatgcaatgcgatggcatcgaaacatcgttcagggaattgaaatatgctatcggattatgttgctttcattcaaaaaaggtggagtatatcattaatttaggcagatagcaatctgtctttttgtgctgcataaatataagagcaagtttttataaaagaaaaatcaggcaaagatagtgaattttctacctctgcctgataggaatacatctgcttaatgtcttaactaaatgacattgtgtttccaagccctcccaatttatctgcttatattcaatttgctcatcaacgcttcctgtagtacttgcgaaaagtttactcccatcgacacagcttcttcatttaaccattccggaatactaagggttttctttaccgcttttgaattgtgcttcctttgatattccaacatatcaaattctacaatcacaatcgttccatcttcattttgaattttatccaaatcggaaggatccggaatttcttctttctcttccttcctgttcactaaagcaagacccaacgcttctactgtcatttcgtaagcctgtttcatgtcatctccttcagtaaaacattccggaaaatctggaaacgaaatccaaaagccgccttcttccgacttatgaaaaagtgccggatagaataatttttccatacgtaatacctccatttatttttcaggcaggattttattttaaccctgcctgctttaatattgcttgctccaaaccctttttcatagccttggagtgataaggaacgattaccgttcttccagtagaccggttcttcattgtaatatgagaaccattttgtctgatttcctcaaacccgtttttcttgagatatttaatcatctctctcggtgtcattggcatcttttgtatctcctttccttatcatggttatattatatcacgtatttttacgtatatcaatatttttctgtaatattacgtatcttattttttctaatctgcttaattacctgattcacgtatgtactcagaatacccacatctaatgtaaacagtaacacttaaaaacaaaaaaatatgatcaaaatcacctatttcgctttgttttatattatactgacactatatgccttcccggcagactgacgataacgaggtgatcctatgcaaaacatgaactattattatgacttttccggacagaaattcaatcatcccttaagtcttagcatcaacagctttgaccgcaaagtattttccagacagaccagcctggagctttcctatgttctaaagggcagttatgaggtgatcacagaacacatctcccactccctgacagagcaggaactggctgtgattgcaccggacgagatccatatactgaaaaaactgcagcctgaaagcgtgattctgaccattcacattgattttgagcggattccggaaaatatgctcggttcctgtaaaaatctgttccatacaattttgtgtactccggtaagcaatgccgctcttttacgctccctgaaagaagaaatccgtcggcttcttatggttcttttcaatggagattccgcagatggaactgatctgtttgccctcaatgagattatgatgaagatcctctgcattgcaaaaaagcagcgcaacacaccttttgaacagcttcctgtggactccactcaccacgagaactacgtgcgggcaatccagtttatcgaccgccattatcaagaggatattcaccttacagacattgcaaaaacgctttctttcagcaccagctatacctccagactgttcacccgctataccggactttcctttgtcaaatatctgtcctatgtgcgagtccgggaatctctggaggaccttctggaagggaaagcttcgattgaagagatttccggaaaatgcgggatgccaaactccaaggcctactctcagattttcaaggaactctacggcattacaccgagcacctatcggaagcgtttcgtaaaaaatctgcttcctcttccggagcaggaaacacgtccgatggaattcacacagaaacaaaaagaactgcttacaaaggtctttcatctggatgatacaaaccgtcttctctttcacgcagaggggattcaaatcgtgtcagatggcgatacactcctttgtacactttctgatgcccgtcaaaaagaactgcttctctctcagaaagaggacgatattgttctgacgatacggccttcctgcacaggaacataactgtttcctttctgttttcaggcattttttgctatgttttttacaggaaaatctatttttgcaaaaaacacgacaaattttgccctgtattgtgttgggaaagagaggatatttctgtctctgcatattaaaataaatgtagaattgtacaggaggaaatcaaattatgaatacatatccaaaactcttctccccgatcaaaatcggagaaactactgtaaaaaaccgcgtatttatgccgccgatctctacaaatctggctgacaaaggatacgtaacagatgctttggtggagcactacgctgcccgcgcgaaaggcggtgtcggactgattgtaacagaagtaacaactgtagagcctacttatgtatatcttccgggagatatgtccatctgtgacgacagctatatcccgggatgggaaaagctgactgctgccgtccacaagtacggcgcaaagattttgccgcagctttttcatcctgcttacatggcattcccgatccctggtactccgcggctgatcgctccgtcttttgtaggtccttactatgccaaggaagcgccaagaccggtcactgttgaagaactgcaggtcattatccgccagttcggcgaggctgctctgcgtgtaaaaaaagcaggcgctgacggagtggaaattcacgccgctcatgcacatggactccttggcggattcctttctccgctctacaacaaacgaacagatgcctatggtggagatatcaatggacgcttaaaactgactcttgaagtcattgccgaagtcagaaaaatatgtggaaaagatttcatcatcgatgtacgtatttccggagatgaatattcagacgggggtctgaatttaaatgatgccatctatgtttccaaacagctcgaaaaagccggtgtggatatgcttcatgtttccggcggaacaacgatcaaaagaggaagctccattcctgcacccggaacaaaaatgggatctcacagcgcgctctccgcagagatcaaaaaacatgtttcgatcccggtggcaactgtgggacgcatcacagaaccatggctggcagaagaacttctggaaaatgataaggcagatatctgcatgatcggccgcgcaaatctctgtgaacctgaattctgcaacaaggctcaggccggacacgaggaagatatccgtccatgtatcggctgtctgcgctgcttaaacggcattatgttcggaaaacgggttgcatgtactgtcaatccttctctggaaccggaaaatgaagacaccatcacccctgcaaaagagacaaaaaatgtccttgttatcggtggaggtcctgccggaatggaagctgcttacgttgctgcaaaacgcggacatcatgttgtacttgcagaccgtcaggattcccttggcggaaccgttcggatcgctgccgttccgattgcaaaacaggatctgacacagctgatcaaatatcaggcacacaaactggaacaggccggcgtaaaggttcttttaaatacggaggttacactggaaacaatccagaaggactatccagattatgaggtcatactctgtgcaggtgcgactccggttgttcctcagtttatgacacaatttaaagactggatgactgcggacgacgtcctctatggaaggaagttcccgggacgcaagattgtagtcatcggcggaggctctgtcggatgtgaaaccgcagattatctggctccggttctgaatgaccgtttccctagaaaccgggagattactctgattgaaatggcacatgagatcatggaagcagaaagtggtccgggaagaagtctgcttgtccagagaatgatggaaaaaggaatccagattctctgcgatgcaaaagtggaagaagtcaatcataccgtgatcaaatatacaaaagatggaaagactcacgagattacagatgccgatacactcgttcttgcaatgggataccgtccgtctaacactttagaggaacagctgacctctgcaggaattacctgtcatgtactgggcgactgcaaaaaacctggaaatatcaaagatgctgtaacagaaggatatcagactgcattgaatttataaaatagaaaagctgagattttatcattcaatttccgatgataaatctcagctcttttttatcgtttctttcctctcccgacgctttctcccagccttacttttgtttcaatcccattaagagaattctcccagatatccggatccggcattgcctttcctttttgtgtgagcagaatgatcgtagaacctccaaatgcaaaatttcctttttcctgacctcttcgcactcttgccgcctgatggcgattttcaatttttcccaccatcattgcccctacttccatcattaaaaccgtcccaaaattttctgagcagagcagcgaaaactctcttgcattctctttatagattgggaaactgtcattcgccaccggattgaccgtatgcaatactcccggtattttcacgttttccgattttactccatcatccacataaatgtaacgatgataatcttccacacaaagccggaacacccatgcatacccgcctgcatagcgttttgcaagcccttcatttttcaaaagactctctgtactgtagcttgtatgtttgatttgaaaccgggaattttcttcaattttatagacactgagtcttccgtcacaaggactgatcagcctctctggctcccgaatgattcttcgtgctcccggaagtgcttttcgtttaaaaaattcattgaaagagcggtactttttctgctcatactgatacatcggaatcttgttcttccggataaaccacgcaatcagcactctggaggcccgagaatccaaaaacgcagctccgatttcagagatatgtggattgatcagtcccttcataagaaaccttcctgtttcatgcgtgtaaatccattccagcagccgatcctgtcctgaactgcattcttctatgtttcctcttctgtctgccagcttcatcctttttacctccttattatctcatcctttgaaaactacatatgccggaaaaaccgcgctctgcagaactcccaccatcctccgttatagaacaggatgaacaggactgcgactcctacgattccgacaagaactgccagttctttattcgttggtttgcggaacttaaaatctgccacaaacaagataccgaccactgccactgtaatatgcagtgcatacagaaaccagtgatatcccggaagtatcagcgatactacaaagagcagcggcagtacgactgacatggatgtgattggaagtccctgatagtattttcgattttcgctggtctcctgctgccgtttggtctccatgacattaaaatatccaaggcggattactccggcaagcccatacagtactaaaattgccatactgtaaatacggcgcatgcccaactcatagcataatacaatcggaaacactccaaaacagaccacatcacacagagaatcaatctgaattccgaactgcttctcatcctctgttctgtttttcttcgttcgcgcaatctttccatcaaacatatcgcataatccggaaagcgccagacagaacacagcccacttcggatgtcctgtaacagcacaaaaaatgccgattattgatgaagtaaaactaatataagtcagcaccaccgtataatcataaaatcctatcatccctcaacacgctcctttatacacttcttttgttctcttactttttcatttcctatcgtaagctgcgccaccactgtaaatgcagcactgatcagtaattctgcataatatcccagtccccggcttaaaaccatacccggaagcagcaaagatccgaacaccgggcgaaaaatattcaaaaataatgtttcactgatccccataccaccgggaagcggcagcatatctaccgcaactgctatcactgcctgaagaaacagaatatcaaagaatgaagttcctgacagtccaaacgcccgatacacaaaccaggtagctgcaaacaaggccattctctgaacaaatgtaattccgaatacaaccacgatcacgcccatatgctcttttaaatatactgccgttccccggtaagtatccatagatgcatccagcttttccagccgttcttctttgtgtttcatcaggcgcagcttttccagcaaatggacgccttttttcaggatttcctttgtcagcaccggatgaaatacaagaactgtcataaataccacacaaaacacattcaatcccaatcccagataatagaccggcagaatgccttccagatatctgtgcagaaatccctgaccaaatatgagaatcccgattccgatcacaaccaggaccagcttatatgtaatcgtcacaatcatcaatactaccgtcgatactggaatcggtatcttttctttcttcatatagtatatctgcatcggctgtccaccgcttgccgacggtgtaatgcaactaaagaaaaaaccaacggaagaaaacagaaaacaagaccgtttcttcaaccgggttccatacgatttcatcatataccagataataattgattctgaccatataaagaataataccagagccactcccggcaccagccattgccactgtgcctgtcgaatggagtgcatcatactctcaaggtcttctcctcgaaaaacaccatatacagtcagaccaaatacaagtaataaaaataaaatattaaaaactgcttttttcttatctctcatgtcgtgctcctcctgtcaaatgaaaaatacagctttgtatcctttcacaaaatctttgatatatccgataccactgtgttttcccggaaaccgtaaaacagatctgcgccaggataacaccacctgccacatcccagacaacatgctgttttgtcatcaaagtggataaaaacacgcaaactgcaatcacacaggacaggtattgataccatttcggaatctcctgccgcccacgaattcccagaaaacaaaaccagcttaccaggcaatgaatggaaggaaacaaattgtccgcggcatcaatggaataaagccagatcacggcctgattccagaatccgtctgccacaatctccggtctggtattggtcgtcggaaacaagacaaaaaaacagaaacagacaatccgggatattgcatctgctgtaaaaaagcgatatacactctctttttcctgtcccgcaatcaaaatgtaattgattccccaaaacagataacatccaaaatagattaccaatgtccagggtatgaaagggatcctctcatccaacacagtctcaatattgtaatgatatcgcccggatgcaatccatctggcaccattatatgccagtgagttccataacaatgccagtaaaagcggcacaatcccgtacgccggaatcagtttcttccttacattgttctgtctgtatctcatcttgcctgctccttcttctccaacatttgacagtgtttagtatagtcgttttctgtttcttactcaatagtctttactgtatctttaagaatctttaagaaatcttaaagattagagagcctgtttccaagctctccaatgattatctgcttatatttaattttctcatcagtgcttcttgaagaacctgagaataatttaccccggctctcgtagccgcctcattcaaccactctggtatggttaatgttttcttcactgctctattattatgcatttttgcatattcaattgtatcgcatgcgatataattcacaaattctccgtcctttaactcgacttctgccggaacagagacctttcatttttattgtggcggatccatggaactgatataataaaggtatcaagaaaacgacagatcagagaaaggaaggggagcagaatggttatttggcttctatttttagcaattatcctgtgggtcaatttaccatccattgtacagaaatgccttacgaataaactcataaataaagattaccatccatcaaatggaccgctaaaaatgattgaatggtttcgtctttacccacttaaaaagttattgctagcctttatatggggattttgtgcttatcagtctgtacggggatttagaatagtgtggattgaaaaacatcaagaagttctatggatcgaattattctttctttgttttactttgttgaccgcatataaaatatggaaatatatcaaaacgccctatcattgtgcaaagttcaacacgaatgtttgtcagtaaaaattggttcgttataaacggaaacctctatgccaaaaagtatataaaggatttgcgctatgtatttccaggaaccagaaataatacaatatggattacttattacaacaataaaagactgactctgcctttttcaagcattgatttgtcaggagataacggcgaagaaatgaaacgaatacttaataaaataatgcggggagaccagagcattgtcgtaaatgcaaaatagaaaatcaggattatccacttaaatggtaatcctgattttctattttctcttcagttctaattagtcttctgcaacatctttcatgctgaagctgaatcttcccattttatcttttccaaggcatacaaccttcacaacatctccaatgttcagaacatcttctaccttgttgactctctctttggagatcttggaaatatgaaccattccttcttttccaggtgcaaactcaagaaatgctccgaattctttgatgctgattacttttccttcaaaaagctgtcctgcttcaaaatctgttacgatcgttgcgatcagcttcgctgctttttccatcgcttctttttctgtaccgcagatagaaactgctccatcgtctgtgatatcgatcttcactccagtctgctcgatgatcgcattgatcgtctttcctctctgtccgacaacatcgccgatcttctgtgggtcgatctgcatctgaataatcttcggtgcataagttcccacttcttttctaggttctgcaattgctttattcatcacttcatccagaatgtaagttcttgctttctttgtcgctgcgattgcttcttcaatgattggtcttgtcagtccgtggatcttaatgtccatctggatcgctgtgatacccttgtgtgtaccagccactttaaagtccatatctccgaagaaatcttccagtccctggatatctgtaagaaccagataatcatcgtctgtctctcctgtcaccagacctgctgaaattccggcaacagctgccttgatcggcacacctgctgtcatcagtgacatactggacgcacatacgcttgcctgagaagtagaaccattcgattcaaatgtctcagataccgtacgaatcgcatacgggaactctgcctcgcttggaagtaccggaaggagtgctctctctgccagtgcaccgtgaccaatctcacgacgtcccggtcctctggatggttttgtctctccaacagaataagacgggaaattgtagtggtgcatatatctcttggaagtctctgcctcatccagtccgtcgattctctgtgcttctgaaagaggtgccagtgttgtcactgtacaaatctgagtctgtcctcttgtaaacatcgcagatccatgaactctcgggatcaggtctgtctctgctgccagcggacggatctgatcgatcgcacgtccgtccggacgtttgtgatcttttaagatcatctttctgacagtcttcttctgatactgataaactgcttcccctaacactgccagccattcttcgttctctgcaaatgcctcttccagtttttctgtaatgacacggatattttcttctcttgtctgtttgtcatctgtaaagactgcttcttccatctctgccggtggaacgatctctttgatcgcctcaaacagttcttccggaaccgcgcagcttgtatattcatgttttgcttttccgcactctgccacgatcgtctcaataaatgcgatgaccttctggttcagttcatgtgccgcaaaaatagcctcgatcatctgagcctccggaacttcatttgctccggcttcgatcatgatcactttctcttttgtagatgcaactgtcagcgccagatccgatacttctttctgtgctgctgtcgggttgaatacaaattctccgtcaaccagaccaacctgagtcgtagagatcggtccgtcaaacggaatatctgaaatacttgtggcaatcgccgcaccaagcattgctgtcagttccggactgcagtcctgatcaacagacataaccagattctccaatgtcacgtcatttctgtaatccttcgggaacagaggacgcatcggtctgtcaatgacacgacatgttaaaatcgcattctcagaagcctttccttctcttttgttgaatcctcccggaatctttccgactgcataaagtctctcattgtactctacactcagcgggaaaaagtcaatcccgtctcttggcttctcagatgctgtcgcagtacagagaactgtagtatctccgtagtgcatcaaaaccgcaccatttgcctgctttgccactctgtcaacatccacgcgcagagttctgccggcaagttccatctcaaatttcttatacataatattctcctttttgtttgaaacatttcccggaacaagtgtctccgaaactactgaaaaaaacaccggaagctttcgatatacttttcagtggtctcgggtatacatacttgtccgcaatctagattattataccatagatatgtatgaatcgcaagaaataaaaagacctctgcctgccggataaaccgacacaggcagaagtccctcttccatgaattattttcttaatccaagtttttcgatcaaagcacggtatctttcgatatctacttttttcaggtatgcaagcagtccacgtctctgtcctaccattttcagaagtcctcttcttgagtggtggtcttttggatttgctttgaagtgatctgtcagctcgttgattcttgctgtcaggatcgctacctgtacttccggagatcctgtatctccttcacttcttccaaattctgcaataatagcctgtttcttttcttttgcgatcatcgtatgatcctcctttaaacttaataataaaccgcctggtattaagtaacggtcggagttgtccgattaccgaacaccggctgaatcctaaggtagtataccacagggattttcggatgtaaagtcctattttttcaactcgattttcaaaacagtatcgatttcatccggcagcggataactgaataccggattttcacccagcgccacaaacggtgtatctgaatacatagctgtattccatgcctcacccctctgcacctgcgctccgctggaaaggaaggtgattgttcctacctcctgcgggctgattccatacaatgggagtgctcccagaggcgtttcataaatatgggcatataccgtgtttcctttttgtgtataacgtccccattccggcttgtcatactcggaaattccacattcatagagactttctccgttttgctccatccattctcctacctgcgtcagaatttcctgactttctttcggaattcttccttttgcatccggtcctacgttcaggataaagtttccgcctttgctgacacattcaaccagtttgcggataatggtctgtgatgttttgtaagtatgatcataataacagtatccccagtggttgttcatcgttgcacaaagctcccacgggatcggttttccgttcagatctttcattcctcccggcggaatgatcatttccggacttgcgaaatctccgctgtaaatattcggatgatctgttacgatacttccgttcttctctccggaaccttccagacgattgtcaataataacatccggctgatgttttctgaccatacggatcaactcttctgctttccatgtatcttcacacatgttgtcataagagaaatcaaaccagagaatatccagctttccgtaattggtcaccagttcttccacctggccatgcatatattccagataccggtcaaaattgatattttcatctttatacgcctcatttccgcgcattggatggtgcatatcattgtatttcggatagtccggatgatgccagtcaatcagtgtaaagtaaagccctacttttaatccttccgcacggaatgcatccagaaattcccgaaccagatcccgtccggcctttgtatttgtcgctttataatctgtcagtgcagaatcaaacaaacaaaatccatcgtgatgctttgcagtcagcaccgcatatttcatacctgctttttttgccagtcttgcccattctctcggattgtaatccgttggatcaaactgctcgaaatatttctcatattcttctactgtcattcgtttttcggacattacccactcgcccagcgccggaatggcatacagtccccagtggataaacattccgaatctttctttccggaaccattcggtccgattccatatttcctgattcattactattttccatatcctttcatttcataaacaacaccgttgtgttcccggctgtcttctgccgccagtgccatcaaatgactctcgatggattctgatgcggcgcttacgctttttgcagttccgcctcctgccaccagttccacaaagtctttcatcatggagacatcgcttccgctgtgtccaccttttggtacttttaccttgatctttgttgtatttccagacgcaaaatcttccacaatgatttcattttcttccatgtttccgcgaatctgtccttttgttcccatcagattgatgatccgctcgcatttattggtaaacgcacacattgtcatacttgctgtcacaccattgtcaaactccagatttactacctgatgatctaccacatcgttgtcacagtggtaaacacaccttccatatggtccgtctttcaatgcatccagcagagattttttatccgtctgaagacttaccacttttgcaaatgttccgcctttttcctctaaatcctccagatagaatcgaggtgcaaaatacggacattcatcccggtgtacacatccgtccagacagtgagccggagcatcttctggtgcattttcttctttaaaatgcatcagatttccgaaacttgtaagtcttgtacaggacgcacctacgagccataataagatgtccatatcatgacagcacttctgcaggatcatcggactgcttaaggacttgtttctccagttaccacgtacaaagctgtgtgccatatgccagtatcccacactctcaatatgctggatatcaacaagctgaccgatcgccccttcatccagaagccgtttcagctctctgaaaaatggagaataacgcagcacgtggcaaatactgatcaccttgtcataattctttgcgatctccccgatctcgatcagttcagattttacaggtgagatcggtttttcacataaaatgtgatagcctttttccacggccagcttcaatgcctcataatgcatctgatcctgtgtacagatcagaacacagtccgccattttcggacggttcaaaagctccatgtccgattccacagcgttttgaggtgcaatatcatgaagctttgcaaactcttcccgtcgatccgctcttggttccgctactgctacaaatttcaattcattgggataatccagggcataagaggcataagcctctgcccctctctgtccggctcccaaaagaatggctgttacttgtttcatgttttttctctccttttagccttttactgccccaccagacagtgcttcaataaagtacttgctgaaacagcagaacaagatcaccggcggaagcagaattacaacgattgcggaaaacattccgttgtagttcgtagaaaatgcattctggaactgtgccagaatcgccggaacagtcttcagttcttttgttgtcagtaccatagatgcccagtagtattcattccagtaattcataaacgccagcattgctgctgtcaggattcccggacgtgcgatcggcagcatgatcttgaaaaatgtctgtgtataaccgcagccgtcaatacgcgctgcttcttccagctctaccggtatcgtcaggaaatagtttttgatgaccataaagctgactgcgataccgctgcatgtatagattaaaatcaatcctgcatgcgtatcgttgattcccatactgttgatcagattataaaccgggaatgtcatcgctgtcggtggaataaacaatgtagacatcaacatgacgctgaccaccgatttaaatttaaagttcattcttgccacaacatacgctgacatggaaatcatgatgatacttaatacgacagaaatacctgccactttaaaactgttaaagaagtatctcataatatgcatgtcccggaatactccgatatatccatcaaaacaaagtgcacttggcagagtaaatcccggctctgccagaggatctgccttcaacgaggaaattgccacccaaataaccggaaacagggagatgaaacataccagaatcatcacaacatacgaaacgatctttccaaaagtccccactccatggaccgcttcattttctttgccttttctctgtctgctcatcatcttctgcctcctttctgttttctctcacgaaacagcatgttaatgatcaggatcaataccagacctcccaggatctgaatcgcaccgatcgcatttgcacgtgcgtactgtgctcttggactgacaactgccagttcacggatcaggaagctgatactctttgttcctgctgctccgttcgtcaggaaataaacttcattatacaacaggaatcctgcggatacggagagaatactgattgtctttattgtatctttaatcaatggaagaacgatacaacgatccagtgtccatcctttggctccatccaaaagtgccgcctcacgaacctcttccggtattgcagaaatctgtcccagaaccatgatcatgtttgttcctgcaaagaagatgtatgcgcaggtcaaagcgatcatatttacctttggtataaacagtacgttgtcctggaaattcggcacaaaaacacggataatttcattgataataccatacttcggattgtacagctgtaagaagatcaatcccattgctgccgaagaaataatattcggtatcacgtaaatatttcttgccagcttccatcctctgcatttcttggagattaccagtgccactcctgtcgcgatcggaacctggactacaagtccgcacaatgcccagatacaggaatttctaagtccttcccagaaatacggatatttctcaaaaatatatttatagttgtcaaacagatgtccaaaggaatacatctgcatatcattcaaattcgtgtagtcccattttgcaaaggaactgatgaccaccgttgcgatcggatataaataaaacacacaaaagcagaccagagtcggtaaaagaaagaagagaataaacgcattctttctcaacttttgtttttttccggttatttccattttgctacctcctactctggaaaatttcatagagaaggaagctgctccttaaatacctcctgcaaagagcagcttccatgatttacaattaaccgatcagaccgatcagttcactctttaattcttcaaattttgcatttacatcagttccggaaacggtagattcgatcagtttgttaccgatcgcatttgcaatatctgttccccatgtagaatcgattgttgcaatcacatattctgcatcatttgcctgagaacatgcctctgcaagaagttttgttttctcgtcagatccttctgccagtgcattcagatccagtgttgttgtacatgggtttgcacctacttctttgaagatctttgtctgtacttcatcacttgtcatatattttacaaattccagtgccagttctttttctgcatcactcatatcatttgctgctgtgattccgccgcttgcagaagataaggaaacgcttcccgggaagattgccggtttaaagtttgtagtatcttcaaatccgcctgctgcccatactccgttgaagaacactgcagactgtcctttgttgaagtctgctgcccagtcgtttgcaccgtcatcggcattgctgctggcattggaagatccgtttttctgatccatatttgccacctgtttgaatgcttcttcaaactctttggattcgattgcttcttctgtcagaggctctcctacgatttttcttccattttcggacataccgaggattgcgttaaagcatcttgtagatccctgaccggcaccatatgcatacacatctccgcctgcggaacgtactttttccattgctccttcaaaatcgctccagttcttccatgtatccggtgttgttgctcctgcgtcttttaacaccttgtcattgtaccagtatcccagtgtcagaagctgatcgtgaaccgtataaatctttccatccacgtcgttctgtgtatagttgattccaacgttgtctttgatcccttcttcatctatgtatggtttcatgtcaaggagcaaatcctgactgatcgctgccagtgatacagaccgtcctgccagatccaccatatccggatagcttccgcctgccactttattttctaccacactgtcgatatcctctgtcggaattgctttaaattccacttctccatctgcatgctcttttgcaaactcgtcatagatatcgcgcataacctgtgcaggtgcccattcgcttgcatcctgataatatccatgataaaactccaataccttgtcatcagatgcttctgttttctttttgccgtcatctgttttctcagagtcaccggatttcccacatccggaaacgactactgttgccgccatagttgtagccaaaatcaggctgatgattcttttctttttcattactaaatcctccttcgatttcctgttgaatttagaatatcatgatcatcagcctgactctatggatagaattgacactttcttgcattatttctggtttttccgtgtcaatttcctgttttttgtaatatatttatgattctgccgttttcttgtaatttatttacctctgttttgtcatatttatgaaaagcgccataccattttcatgatatgacgctgcaactattgatataaatttgtacaaaactgctcttcatccaaagtcccgttaagaacttccataatctggttccgaaaattttccagctgatctgccgtccagagattgtccggcacctcaatgatacggtctgctccacgaattgcttccacagcattgcacatcctcggaatctgctccttatattcttccagatgtatctttgggctggacggcatttgtccggtttccagaagaatccgcttctgtaccttttcgctgagcatatactttaaaaattcaacactggcatccattgtctcttgattcccggtattgcctacaatatatcccagacatacggaagaactggcgatcgtgctgccattctttcccggaaacggtgcatagcaggcatcgattttttcatcgatcagcttacttgcccacactccattgatatacatggctgtatttccactgttgaacatacttccttcgtccctgtatccataatttttgtctgtactgtccccatattgtctgatctgcttcattgtctctaaaaccggaaaaagttcttttgcacttagcatcatcgaatgattttccactgcgccctgtgcttctttggaagtgtccaaaagcagggcatctgccagataagcactgttttctttcgtaatctgtaccgggatcaccgattttccttcattctgtgaccagctctgtatcttctcacaagcctccagaaactcatcccaggtctccggtaccgattcaatccccgctttttcaaaaatatccgcgttataccagtatccccctccaagcaacagtacatctgacagggtatacagcttcccgtccttctgccagtaggaaatgatctccggcgctacagagtctgcaaattcctgatctttctccagataaggcataaggtctgccgctttgtttttttcttccataaagcggtacaccgaatcttttccgtagcctcctgtaaaaatcagatccggaacctctccaacagaaagcatgttttttgtctttttgatcacctcatccgatgaagtcatggacatcagattcagcttgatctccgggtgctctttttcaaaatccttataaatctgccgcattctgacatgctccgattccatggagccccaaccatgtatcagcgtaatctctgtctgctccgcgctctccttactgcagcctccgagcagacaggccgtcataagaagcagtaaaacccacgttccttttctcatagatttcttcctccggactgctcgtattcctttggcggacatcctgcatatttcttaaacacctttgaaaaatatgccgtatcctcaaaaccggtcaatgctgcgatctcatagattttcttgtctcctcttaaaagcagttctttggctttttccacacgaagagaattaatcgtatcaaacaggttctctcctgccttcaatttgtaaaaccgactcagataactggagctgacatggactgcctccgcaatatccgccagtgtcaggcgctctgtataatggttccggatataggtctgaacacgctttaacaatgtatctgtcccatctccctcttctgcattctgcggcacgatcaaaatctgctctgcacttcttcccttggcgtaggcctttgtctgttcatagagcaaggaagaatcatctccctgctgataggcccggctgcacaaaatctgcggcgtctctccaagaaagtttttacaaaaggctttcattttctcacaacagctgaagatttcctctgtccgttcactgtcattgactgtaagcaccagtccttcttcctccgttccggatgaaagagcgcggtattcaaacgaatgaaaggcatgcagaaagaattttctcaccttttcaccctgacgcaccggtgttaccaggagcatccgataccaggtcatatttttactctccagccgctgtttgatatttgcaatggctgccggaatttcttccagagctgctgttttgacaatataatcactcacctggtactgaattgcctttcgtgcatactgaaaatccgcatacgcagtcagaaagatcacagacgtccggatatgatttttataaatgtattccgcaacttccatgccgtccatcagcggcatttttatatcaatgatcgcaatatccggcggacagctgcggatctgttccaacagatcctgaccattctccgcaacatagatcagctcgcatccaagctcctcccagggaatcagcttttccaacccttcccggatatatggttcatcatctgcaatcatcactctccacatgactttcttccccctttttccaacggcagacacatcgttacacaagtacccgcacccggtgtactctcaatcttcatcgatgcttcttcaccgtatatcgtatgaagcatctgctgtgtattggtaagaccgatgtgcgtatgcttctcatcttccactgcctgccctttgttcttctgctcttccacatcaaatccgactccgtcatctttgatctgaatccgcagcttcccattttcttcttttgcttccaccctgatatgaccgcttcccggtttcggttcgagaccgtgtgaaacagcgttttccaccaatggttccacactcagccgcggaattctggcatttttcacttcttcactgcaaagtatatcatatgtaatctttcctgcaaaccgctctccctgtaaaagcagataaaactcgatcaactccatctcctgaaataacgggatttcaatctctccgttccggaaaatctttccctgaatcagtctggaaaatgcgctcaaaagcttttgcagttctttgtttccctgcaatcctgctttcatactgagcatggataaaatgttaaacatgaaatgcggattgatctgagactgcaaatattttacctgagcctgtgtagcaagaagctgtttttcatagacttccgtgatcagatttttgatctgcccggtcatctcattaaaccgtgtgctgatctcatcaaactctcttgtatcaaattcccgcatctgcgcatccagtctgccgtttccaaatttccggatatcttctccgataaacttcagcggacgtgtcattctcatggataccgcaaatacgacaatcgccgtgattccgatcacgatcagaaaaatcactgcaaaaggctgtacggtggaacggatcgaggcatagatcagattcttgggaagtgccatcctcagttcaatcccaaacccggttttccctccataaaagagagtcatctgatttctgatcttttcctcactgcttcccaaatcctgaatttccagcatctgttttgcctgttcttttcccttttcatttgcaaacagaatctgtcctttttctcctgtgatcagccagctgctttccggatattcttttgttttggaaaacaacgtatccaccgcactttttccaagggaaataatgcagcagccggactcctccatctcctcattgtatacacgcatacatacatacgcgcgttcatcatgtgtcatataccagtattcattgctgcttttcaaaaaactggaattgatttctttataaatttgattctgaagctccatattttccactgtctccgggtagaaacgactgctcacccattctccgttttcattaaacagatagatgcagtcgataaacggagaggcggaatcaaccatattcatttccgaaaacaaatcggtactgtttgcaaactgctcccttgcttcttgctcattgtacgcttctcccgcgataaaatgtttcagcacattattatgccgcagagaaatcaccatattttccatatttttgattcttgtatcaaactgcccgcttgtattctcgagataaaattccaggtcagaacgagcctgtctcgaaaaatgaaaaacggacaacaccatctgtgcgattccaagaatcaatgtcgaaataatacaggccgacaaagtcagaaagatcagctttgtacgaaaacttggttttttcttccctttcttcataaaccacctcactgctgcgcccgaaaatactccataccaaataaaatatctcgatccacctgtgtttttaactcctccagagatgcaaatctgctctccggtctctcaaacgcacagaattcaatctccacatattttccgtatgcatctcccttataatcaaatacatacacctctgtcaaaatccgttttgcatccgttaccgtcggtttgatccccagattgccgattccgcaataccaggttccatccatttttactctgcatgcatatacgccaaaccggggggctgctttttcgggcttccatgcgacattcaaagtgggaaatcccagcgttctcccgagcttttgtccatgctctacaacgccctctgtacggtatcggtatcccaaaagcttttctgcaagttccacattgccgactttcagcgcctctctgatataggtactgctgatttccctttttcgatacactgccttttctacaatctccagctcatatccatagcgctttgcatactgtttcagcatacagatatctcctcgcttctgatgaccaaaatgaaaatctgttcccactgcaatgtatgcggcatgcagttgttcaatcaggatcttttcaataaattcctctgcttccatctcacggattgcctcagtaaacggacagatgatcagcgtatccacacatccttccagatatgctttcttttcctcgcctgtcatcaatgcttctttccccatatcaaatgcaaaaacaacactttccgctttttcctgatccgcaaatctttgaatccggctgatcagttcctgatgtcctcggtgaagaccgtcaaactttccgagtgtgacagctgtcctgttttctgtctgatatttgcttaagtctgttacgtactgcataatcatcctcttatttcttcctgatccagaaacatcttttccacagtaagttttttcctgtttttatcaaaacagaagataccgataaaatgattttccagatcgtatacacgtatccattcctgattttttctttcttccatatctgttacaaagcggattggaatctcatttccgttatacgcaagcgcctgcccctctttttttaccgtcacggcaggatattggaaaaacactgcatccagaggggttataatctctgaaagctttccttcctctctttttttctgtatttctgaaagcttcagactgctctcaatctcaaaacggctcacctttgtacgaagaagcgactccatacatccaaagcaacccagcttttcaccgatatcgtgacacaatgtccggatataggttcccttggaacaggaaacctccatcctcacacgcggcagtgccatttccaggatccggatctctttgatttcaactttgcggcttttgcgctcgattgtcttcccttcccgtgccagctcatacagctttttgccgtttactttcagtgcagaatacatgggcggtatctgatcatattcccccacaaaactcatcacacagtcttttacctgctcctgcgtgagtccttctgtctctcccactctcagcacagttcctgaaatatcctgggtatcggtctcttttccaagcaacaggaccgcctcgtatgttttatccttttccgtgagcatatcacatacctttgttgctcttcccagacaaacaggaagcacgccttccgcatccgggtccagcgtgcctgtatgtccgatcttcttctgtcccacaattccacgcagctttgccactacatcatgggatgtgtatcctttttctttgtatacgttcagaattccatttaccataacaattcctgtctttctcttctatgcctcttttagctgcaatgtaatctgtctaagcagattgttgatcacatcgtgcgcagaacctttcattgtaacccctgctgcacgcacatgaccgcctccaccaaaatactgagcaatactgcttacattgactttgcccttggaacgcagactgaccttatactcccgggtgtccgtctcatgcagaaaaatcgccacttccacaccttttgtctgccgaagctgagccacgattccctccagatcgcttggaactgcctcgaaaaattccatctcttttctggatacaacagaaacgaccacctgtttttctaaaaccagcatgctttctaaaagcgctctccctaagatctgattctggatataggtcttctcaaaataagttttttcgataatctcactgccgtcaattccttttctaagcaactgtgcggctgcctccatcgtctccggagaggtacaggagtactgaaatactcccgtatcatgtgcgattcccatatacagtgcttccgcacatgccttactgatcttctcatcttccagaagtgtataaaccagctctgatgtagaacttgcctccgggcgaatgtaatttaactctgcaaatgcatcattgctcacatgatgatcgatacaaaccgtatgtgcagcctgtcgaagtaacggtgcaaacggtccgagccgctgttcgtccccacagtccagacagataaacagatcatatgccgtctcttctgaaagtgtatgtctgatttcctctgtacgcgagattatggaaaaggatgccggtatcttttccagatacagatcaacttctatttccggaaactgctctgtaagatacaggtacaatcccatcgatgatcctacacagtctccgtccggccgaacatgaccggagagcgcgatccgcttctttcccttcaaaatatcagataatacaattttcatgcttatttatttatcctcacttttcaaatctttggtcagatcattgatttttttcgtcatattgacaccgtattcaatggactgatccatgataaaccggatctccggtgtattgcgcatgttgatcgttcttgccagttcacgccggatatatccttctgcactctgaagtcctgtgatcgtatcttcctgggctttcttatctcccagcacgctgatgtatgccttacatgtcttcagatcaggtgctacttccaccgctaccacggaagtcatcggcgccactctcgggtccttgatgcctccgcgtaggatgttgctcagttctctttggacttcagtattgattcttgtgtttttaatactgtttttcctcataactgctccttattttctttctatttctaccatcttgtatgcttctacaagatcgccttctttgatatcattatagttttcaaatacgaaaccgcactcgtatccggctctgacttctttcacatcatccttgaatcgtttcagagatgccagaggtccgtcaaagatcacaatgccgtcacgtgtcagacgaacagaacaatttcgttcaaaagtaccgtcctgtacataagaacctgcaatcgttcccactccggatgccttaaatgtctgacgtacttctgcgtgtcccagtaccttctcttcaaataccggatccagcatacctttcattgccgcttccacatcttcaatcgcattgtagatgactctgtaaagtcttaagtcaacgccttcacggtctgcaatctccttcgctgtcgcatccggacgcacgttaaatccgatgatgatcgcattggaagcagatgccagaatcacgtcggattcattgatcgcaccaactccgccgtgaatgatcttgatcacaacttcttcatttgacaatttgatcagactctgtttgattgcttccacagaaccctgtacatctgctttcactacgatgttgagttcttttaagtttccttcctgaatctgattgaacagatcatccagagacatcttggattttgtctcttcaagcatcttcactctgtgctgtgaaataaatgtctctgcaaagtttcttgcttctttttctgactcgcatcccacaaagacttctcctgcctgcggaacctcattcaatccgaggatttctaccggctgggacggacctgcttcttttacacgtcttcccctgtcatccatcatggctcttacttttccgtgtgcggatcctgctgcaatggcatctcccacacgaagggtacctttctgtacgagcactgtcgcaacagaaccttttcctttatccagctctgcctcgatcacaagtcctcttgccacacggttcggatttgctttgagctccatcacttctgctgtcagaagaaccatctcgagaagctcctgaattccttcttttgtatgcgcggataccggtacgaaaatcgtgcttccgccccagtcttccggaatcagttcatactctgtcagttcctgttttacacgctcaatatttgcacttggcttatcgatcttattgatcgctacgataatttcaattcccgctgctttggcatggttgatcgcctcgatcgtctgcggcatcacaccgtcatctgctgcaactacaagaatcgcaatatctgtagaatttgctcctctcatacgcattgcagtaaacgcctcatgtcccggtgtatccaggaatgtgatcttttctccgttgatctctactacagaagcaccgatgtgctgtgtgattccacctgcctcgcggtctgtcacactggtatcacggatcgcatccaacagagaagtctttccatggtcaacgtgtcccataacacatacaacaggaggacgttttaccatagtagcttcatcttcttcatcttctttgagaagctcttcaatgacatctacaacttcttctttttcacaaaggatctcaaattccattgcgatttcttctgctgtctcaaaatcaatttcctgattcactgttacgatcttgccctgcatgaacagtttctttacgatcacagacggtaccactttcatcttgtctgccagttcctgaattgtcagtacttccgggattgtgatctgtttgatttcctcttcctttttcacttccggctttggctgtggtctctgcacttctactgtcggcttctgctttctgccttttttgcccttgctttcaaatccttcttctctgttttcttttttcttgtaatctttttctttatcttttgctttattgcgctgcggtttctgctgctctaccaatggcgacggaattgaatttctgtcgtttctgtcatttctgtcgtttcttctggaatccggacgctgaccattttttgccccctcgtcctggcgacggtttcctctctgaccgtttggagcagaagacggacgctgcccgtttcttccatctgccggacgattctgacggaaaccgcctctctgtccctcttccggacgtcggtttcctgccgggcgtccttcctgtggtcttctgttctctctctctccatttgcctgcggccctctcgccggacgatcctgacgggatccattctgaccggaagccggacgctgtccgtttcttccgcctgccggacgatcctgacgggatgttccctgtgtgttctgtccatttcccggacgggatcctcccgggcggcggtttccgctcttcgaattctgtgggcggaatacctgtacgatatttttctttttcggagcatcttccgatgttccttttcctgcgtgcccgctgcgcagttctgctacgacctcatccggaatggagctcatggaagttttcgcctccacattctttttctccagaatctccatcaggtctttattttccatccccagctcttttgccagttcatgcactcttaatttcgtcatactcaaactacctcctctatgcaatcgtattattttttatttccagttgttttcgaattccttttgcaaatccttcgtccaatatcgccagagatgcacggaactcttttcccattgcatgccctaaggtatctttatctccgtaaaaataaattggaacctcataaaacttacacatatcccggaatttctttttggtgttatccgatgcatcttccgctacgatcaccagtgcagctttcccggattttgtctcattttctgtcatgaattcaccactggcacattttcctgcctttgtggccagcccgatcagggacagcactctatcttgcttcaaattgttccatctccttttccagccgttcatatacttcttttggaattgcctgcttaaacgaacgttccagccctttattttttgccgcctttgcaaaacactcacttgaaagacagacataagcaccccgtccgttttttctgccggtcgtatccaatacaaattcatcgtcttctgtccgcagaactctgagcagttcctttttggctttcatttctccacatccgacacatttgcgcatcggaattttctttttaccgttcaaatacctcacctctcaaaagagtttattcttcctctgcctctacaaactcaatctcttcgtatgcatctgcatcttccggatatccgtctgtatagttgacagtttcctcataatcctctgcatatccgtcttcttccatcatgttcatctgatccatgtaatcctccgggagttctccggactcgatcgcctgtgtctcgctcttaatgtcgatcttatatcctgtcagacgcgctgccagccttgcattctgaccttcttttccgattgcaagagacaactggtaatccggcacaataacacttgccactttttcatccggatctgccataacagagatcacctttgcaggacttaaggcattctcgatcagaagagccgggttatcactccagttgatgatgtcgatcttttctcctctgagctcttccacaaccgcattgactctggcaccgttcattccgacacatgctccgaccggatctacattctcatcatttgaccatacagccatctttgtacgggatcctgcctcacgggcaatgctcttgatttcaacggttccgtccttcacctctgcaacttctgcttcaaacagacgtttcaccagttccggatgtgtacgggaaaccaggatctttggtcccttcggagtgttcttcacttctacaatgtacaatttaatgcggtctgtcggtttaaacacttctcctttgacctgctcattttctgtgagcatggcatctgctttacccagattgacactgatatttttgccaacataacgctgcacaatacctgttacaatgtctttctctttttcaaaatactgatcgtatactacttttctttcttcctcgcggatcttctgaagaatcaggtttttcgcattcattgttgcaatacgtccaaactctttggactgtaccggaacctgacaaacatctccgatctgcagtgcagaatcaatctcttccgcatcttccagtgtgatctcgattgccggatcaaacacttcctcaactacttctttttctgcgtaaacagcataatcacaggtctctctgttcatgatcaccttgatgttatccgatgtcccgaagtggtttttgcaggcactgatgagagagttttcaatcgcatccatcatggtatctctgctgatgttcttctctttttcaagaattgtcaaagcttccattaattctgtgttcattgtttcatttcctcctaatttaaaaatccaacgctaaacggataagtgcaatttcacttttttcaaatgtctgtgtactgtcatcttcatatgagatcgtcactgtgttctgatcaaattctttcagaattccaacaaattctttctgtctgttaatcgcacggtacgtacggatctccacttcctgtcccacgcttctgataaaatctttttctttcttcaaaggtcttccaagccctggagagctcacctcaaaaatataggaatcttcgatgtagtctttctcatccagaatgtctgaaaatcttctgcttaccacttcgcagtcatccactgtgatccctcccggcttgtcgatatatgctctcagataccagtttcctgcttcttttacatattctacatctaccagctcgaatccctgttctgctacgatcggctctaaaagttcttctgtctgtttttcatattcttctcttcttgacacgtcaaacttcctttctatctcacttttttattttccagtatcgttatcttctcccgcatgaccgcatgatatgtaaaaagccctatcatacaaagaagagtgaactttcgttcactcttctgccggattgattatgtaactatagacagtatagcaccattatctggtgaaagcaagggataaatcaaatttatgtttatcacttcctctgcttcgtcccgacaccgtctctcttagccagtttcagacggttcaaggtcacttctttttctccatatttcacttttatatctgctccctcttcaaacagatggatctgctccagctcatccgttttctgaagcttgattccgcgcacgccgactgcaccttttttcttttccggaatctctgctgtcagaaatcttaagaaatatccatctcttgtctgcagcacaatattctgattctcctgaaccatcccaacatggatcagtgcatcctcttcctggagcttggttgctgcaatggttcgttttgccacctggaactcactgccgtctactcgcttgatcattccttgctttgtggcaaacaaaagcttctcaaacgcgatctgctgtgcgtcacagatcgtcacaatctgttcttcactgctgctgtaattgctcacattgtcaatcggaacgcctttatcccggaatcttccatatggcagatccatcactttgatctgatgcatttttccggtatccgtaaacagacagatttttccggtattcagacaatttacaacatatttattctcactgtctgccgcctctttgtttcgctcatacacactcacatccactgttttcgcatacccgaagcgatccatcaaaaagatcacttcctgctcttctactttcttttcttcaaacactgccgcctctgcattttcaatcgcagtacggcgctttcttccatactcttttttaaatgcatccagctcttccatgatcagcgttgccatggaatcataatgattcaaaatatcttcatagcgggcaatatttttcagcgttgtctcgtgttctttctgcagcgcttcaatttccagaccaatcagtttatacaaccgcatttccagaattgcagatgcctgtctttccgtaaaacggagcatagccgccatctttttcgaaatctgagatttaaacttgatgttctctgtgattccctgcgtcagacatgctttggcatctttgacagacttgcttccccgcagaatctcaatgatcagatcgatcacgtcacaggctttgatcaaaccttcctgcacttcttttttatccagttcttttgcgagaagcgttttgtattttctcgtggtcagctcaaactgaaaatccacatgatgctcaatgatcgcctttaatcccagcgtttccggccttccgtttgccacggccagcatattgactccgaatgtatcctccagacgcgtctttttgtagagcatatttttcagattttccacatccgcgccttttttcagttccagtacgatccggattccttctttggaagactggttggaaatatccacgatatctgttgtcttttttgtttctacaagattgcagacgtcattcaaaaactttccgattccggctccgatcatggtatatggaatctctgtaatgacaagctgttttttaccgccttttaaatcttctacttctacctttccgcggatcttgatcttcccctgtccggtctcatagatttcaggaagatcatctttattgaccacaataccgcctgtcggaaaatccggtcctttgatgtatttcatcagctgttttgtcgtaatggcgtcatttttcatataagcctttaccgcatcaatgacttctcccagattgtgtgtcgggatactcgttgccattccgactgcgattccttccgctccattgataagaagattcggaacccgcaccggaagtaccagaggttctttttctgtctcatcaaagttcggtccgaaatcaatgatatccttgtccagatccgcaaggtatgcctcctgagtaaacttggtcagacgtgcttctgtataacgcatggcagctgctccgtcgccttcgatggaaccaaaatttccatgtccgtccaccagcaccattccctttttgaattcctgtgccataaccactaaagactcataaatggaactatcaccatgaggatgatatttacccatcgtatctcccacgatacgggcacatttccggtatggcttgtcatagcggatccctaattcatacatatcgtaaagtgtccgtctctgtaccggtttcagtccgtctctcacatccggaagggcacgggatatgatgacactcatcgcataatcaatataggacttgcgcatcacatccgagtattctgttctgattatctgtgattcactgctcatatcttttctcctctaagcctgaacttctgctatatatccagttctgcctctgttgcattttcgtaaataaacgcccttctcggcggaacttccgtacccatcagcatctccgtcacaccggaggccattctggcatcctcgatctctaccagcttcaaaatccgggtttccggattcagcgtcgtttcccaaagctgatctgcatccatctctccaagacctttgtatctctgaagagtaaatccaccgtcatgtgtcctccggtacttttccagagctttgtcatcatacaggtactcttcctctccttttttcggcatcactttataaagcggcggcattgcaatatagacatgcccctcgtagatcaattccggcatgaaccggtagaatagcgtcagaagcaatgtcgaaatatgggctccatccacatccgcatctgccataatgatgatcttgtcatagcgaagctttgtaatgtcaaaatcattgccgtatccttcggaaaatccacatccaaatgcattgatcatggtcttgatctctgcgttggcaagcaccttgtcaatgctggccttctccacattcaggatctttcctctgatcggcaggattgcctggtagttccggtttctggctgtctttgccgaaccgcccgcagaatctccctctacgataaaaatctcacatttttttgcatcccggctctcacagtttgccagtttcccattgctgtcaaacgaatatttctgctttgtcagaagattcgtcttcgccttttcctccgtctttcggatctttgcagccttctccgcacaggacaatacttttttcagcgtctctacgttccggtcaaaatacagaacaatctcatctccggtcacttttccggtggcttttgctgcatccgggttgtccagctttgtcttggtctgcccttcaaaccgcggatccggatgcttgatggaaataatcgcggtcatcccgtttcggatatctgctcctgtaaaattcgaatccttctcttttaaaataccaagctctctggcatattgattcatgaccgtcgtaaatgttgtcttaaatccggtcagatgggttcccccttctgcattgtaaatattgttgcaaaatcccagcacgttctcatggaactcattgacatactgaaatgccgcttcgacttcgattccttctgctgttcccttgaagtagatcggatcgtgaagcacttcctttttctgattcagatcccggataaatcccagaattccatccggttcatgatattcaatatgttcctgcgaatccggacgtttgtcatcaaatacaatcgtcagctcgggattgagataagcagtttcatgaagacgacttttcacttcctctgcccggaattttgtcttctcaaaaatcgtatcgtccggtaaaaaattgaccttggttccggtctttcttgtctttccgatggttggaagcagtccatcctccaactccaccactggaactccgcgctcatagcggtcgtggtgaatatatccctctctgctgatctgcacatccatataaacggacagcgcattgacaaccgaagaaccaacaccgtgcagtcctccgctcgtcttataggcactatcgtcaaattttccgcctgcatgcaatgtcgtatatacaagacgtgccgcagagattcctttctgatgcatccccaccggaacgcctcgtccgtcatcctccaccgtagcagaaccgtccttttccagtgtcacatgaatatttttacaaaatcccgccagatgctcatccactgcattgtccacaatctcatagatcagatggttgagtccttttgtcgagacacttccaatatacattccaggtcttttgcgtacagcctccaacccttccagaacagaaatactgtccgcatcatatgtattgctttttcccatattttctctcctaatacaaacttcttccatttgtcgctaacgttcagaatatcatgttttccttcttttttcaaacacttttttcgaaagtacgttcttatccaatcacctgacacaacgtctccgccagtacttccatggcatttttcatctcctgcaccgtattggtctgggcccctgcctcgatcagaagagattttggaagcagatgcagattatagcggtacgcacgcagataaatgtgtctggcaaatccgggaaacatcctctcagatgccagttccatctgaagagaaaaggcaagattatcctgaatgtacggatttggcagataggtgatatctccgtttgcccgtgttctgctcagtccgttaaaatacatgatcttcgctgtcggctttccattcacctcggtcacaagatgtgtcccctctgccacaccatctctgtgcagatcaatggctacctcaatggtcggatttgcttccagaatcgggcgcacaccttcctctgcatactcatacgcgttgcttctgtccagctgtccgttgatgatgtcatagacacctttatcatggatcgtttcaatccctttctgattcaaaagttctgtcagataatccccgattcctacaatactggtagaggggtcaccgggaatggaatctgcaaattcttcctgggaatgggtgtgaaaaattaaaattttcggccccttctgcttccggtcgatcttcatgctccttccaagaagatcatctgcattcaactgctccggtccgatcatcgtagaactgtctaccgtataaaaattgctcaaaagatagtcaaagtcccgcagtctttcaatcgacatatcgatggaagatttgctctcccccagatttgccggcacttccgcagtcttgctctctcccaccagattcccatctgcatccacaacgctttcatcgttggcctgcttctccagtattttcgccagcgtctcctcatcctccacttcctgctccagattctccctgtcagaaacatattttactaaaggcagccaggaaagtgctttttcccgaaaccagtctttcgaacttctggtctcatccgctctctgataggccaccccgggcatgtacattttttctgtatactcctgtaacacctgcctgctttcatatctaaatgccctccaaaattcttttcctccgatcagcgctgccagaagcacaagcgctgccatcagcatccatgcccggctttgttctctcttcatatccacaccagtcctttgcacgatttctgccaacacacctggggtatttatatgagacaaattttccttttatgactcttctgcgttagaaaaaagcagatttaaaccttccgaaatcgtatagctgatctgtttcaccatttcatccacgtcttttggcgtcacaaacatcccgtttaaatgcggagcgatcagttctttgatcagttcatacttttctgccgcattgtaagaacggagcacttcccccacactttttaatgcctcagaagattccagcgccaaaatcaggttctccatcgtatcattgacaatggttgccgcatccacaactgtcggaactccgatcccgatcaccggaactccgatggattctctggtaattccgtttctgtgatttcccactccggaacccggatggattccggtatctgcgatctggatcgtacggtttaatctccgactgtttcttgctgccagcgcatccactgcaatcacaagatccggtttcgtttcttttaccacaccacggaccacctctacagtttccattcccgtctgtcccatcacacccggagccagtgtgctgaccagattcacatgctgcattcccatcgcatattttccgtactccttgacaatatgccttgtcgcacacagattgtctgtcacataaggaccaagcgcatccggtgtcacctgacggtttccgagccctacaatcagaacggaaagttcttctgtttttacattctgcgcttttaagagctcctgcacaaatcctgcaattttctctgaaacctctctatggtagtctgtgtccggcactgccatattcggcgcttctaatgtaatgtaggtacccaccggtttccccattgcttttgcacctttttccgtctcaatctttacccgggtgatccggatttctttttccttatcatagtcctcctccagaatcactccctgtatctcgacatgatccgactcaaaacgctccttttcctccagtgccaaatctgtacgaacactatacttttccaacattttcgctcaacctcgctttttctccatttgccgataatatttccaataatttgagaaatatgtattgacaaccctgaccagttggaataaaataaatgagtatgttccgttagaacgtccgtgtccgagtctggcgggattatgaattcactatttgaaaatatttcatactatttggaggtgtacagattggctaacattaaatctgctaaaaaaagaattttagttaacgaaacaaaagctgctaaaaacaaagcaatcaaatcaagagtaaagacttctgtaaagaaagtagaagctgcagttgctcagaaagatatggaagctgcaaaaacagctctcaaagcagcaatcggagagatcagcaaagcaggaagcaaaggtgtttaccacaaaaaaactgtttccagaaagatttcccgtcttacaaaagctgtaaacggaattgcttaatttttgatataaatatgaatcataaaaagacatccgctaccgtcatggcgaatgtcttttttgtttatgctcccgcattctgaagcagatcagaattttacaagaccgaatgtattgacaattccatccagtttctgcccctccctgcacagcgggcagtctttggctgcatatcctttataatccggcagatcagaaaccgtaaagattgacctgacatccatacctgctgcccggttgaccgcactgaatactgcacagataccacatacacgtccaccgtaatacagcactgcttccacggcttttgcaagcaaagcaccggtcgtcacagaatctgtcaggatcagtacctgcttcccttcgatcatacgctggttactgtcccgaaacagtatctgtcccatggtatcaaactccggtgtcacaaccgaaatattatttcctgcactcatggaaatcctgcctgtatccgccagatgttctgccataaatgcgccgatcacttctgtatttttcagacatacgatggtttctaccatagtaccggttttgtactcttctgccaatgtagctgccgtctctcttgcattattatgccgtgtcttgacagtagacatatcaatatacgtgttcacgtgcgaattcatcgtcgcaaaatgtccacccatcaatttgatacgtgctttcggattttttctggaacgaaggtttacaaattcttctgtcatagtatccactcctctcattgaaagattttcgtgtaagttatgacattattttagcatatttcatttgatttttcattaaattctgaatatttcgttttattcttcattctgcgcgcctaatgtatccaggtagacacgttcaatatgcattgccaggtaaccgacttccattttttccagcctgatcttgcagccgcgttcaattttttcacagattgctgctgccagcgcaaatgactccggatgtttttcttccatatattcattcatatccaacttgatgctctctccccgcactgcccgcataaccatgtatttcacatgattcatcagacggttatatgcaagagacatgacatcgatcttttttccactctcccgctccagaacctgcacacattcccggattgctcctgccatctgcattgctgccgatacactctcatcctcgattgctgagtgaatatgaagcgctacatatccgatttcatgtgcatcaatctcaattcccagtcttttctgaagaatttcttttaattgggatgcaacctcatactcgctgtggaacaataccctgatgtcctctgtcaatggattactgatctgttccccacttaagatacgatctgctgcaaaagaaatatgatctgccagcggaaacaggattctcctgtcaatcgtgccaaatttcatctctgctttttgcagaatttcatctgcgatctccagatattccggagaaatgctttttgccagttcttttgcactcccccgttccgtatcttctttcaaagaataccgggtgcagttatccggcgcttcaaatctctggctgatttttttcccaaaaccaattccttttcccagcagcacatattctatattttcttccatattaatcgcgatcacgccattgttattcaacactttacttactctgtacatgacattcccccggtttttgttttctgataacagggtatcaaaatattgccaaaaagtaaagcggacctgaacggtccgctcatttttttatttttcggttggtgattgatgcggacagtaacattttccgcaatcaatactatgcttcataaacatccacggcaaacaatggttctcccgcctttatctctccttctttcaaaagacgaaccttctgattgtctcctaattctgtacacagaaccggtgaacaaagagacggtgcatgttctttcagataggaaatatcgattttcatcaacggctccccttttttcactttctgtccgttttccacaaaaacttcaaatccctgtccgttcagtgccactgtatcgattccgatatgcagcagaagtgccatttgggaatctgtctggaatcccagcgcatgcttggtctcaaacacaaacacaacctcaccgtcttccggcgcaaggatcatcccgtctgtcggaattactgctgctccgtctcccatcatttttccggcaaatccctcatccggaacctctgaaagctccactgcatttcccgtaatcgggctggatatgatcacagtttcctttacttttttctctgaatcctgctcttttgaacttgtagtctgcacctcttccggttcagaagctgcttcttctgcgaaagcagttgtttctcccagaggcatatcttctgcggtttccagatagtcctccagattcgctttgatcacagttacatgcggcccatagattacctgtactccctggcctttttttacaattcctctggatcctgtctgcttgaggatctcatcttttacctttcctgcatcctttactgtgatacgaagtcttgtggcacagcaatccacatcactgatattgctctttccaccaagaccttctgtaatcatagcactgacaggatctgcagctgctcctgcatctccttttttactgctttcttttcttgcattgacatctgcttttgtatacagctttgtcgttgtatcatcgtcttcacgtcccggtgtcttaaaatcaaattttttgatcaggaacgtaaaaatcacataatacaaaataaagtaaataattcccaccggaatcacccgcatccagcttgtcttctcatttccctgcaaaataccaaacaggaagaaatccaaaaatccaccggagaatgtcagtcctactgcgatattcagcatatgcgcgatcatataagccgaacctgccagtacaacctgaaccgcaaataatgccggtgctacaaacaggaaggaaaactctaatggctctgtgatacctgtaagcatacaagccaatgctgcggaaagcaacaatccacctgccgcttttttcttttccggctttgcacagcggtacattgcaagagctgcacccggaagtccaaagatcataaagataaactcaccggaaaaatatctggtcgcatctgcgctgaaatgcactacattggctgaatccgccagctgggcaaagaaaatattctgacctccctgtaccatctgtccggcaacttccatgctgcctcccacggcagtctgccagaacggcatataaaatacatgatgcagtccaaatgggatcagcgcacgtttgataataccgaaaatcaacgttcccacatatccgcttcctgtgaccagaccacccaaagcgtaaattccattctggaccggaggccagataaagtacattccgatacctacaaacatgtatacaattgtagaaatgatcggtacaaaccgggaaccgccgaaaaatgataatgcgttcgggagcacgatcttgtgaaaccgattatgcagcgccgcaacaccaagccctacgataataccgccgaacactcccatctgaagagactgtatcccgcagacagaagcaacggttccttccagcacattttttgcgatttctccgtctgccgtgatttctccgtttactacaagcataccattgatcgctacattcattacaaaatatgcaatcagtgcagacagtgcagatacttctttctcctttttcgccattccgatcgctacacctaccgcgaaaatcaacggcagattatcgaacaccgcacttccgaccttgttcatgatcgtaagaagtgcatggagcactgtaccgtctcccaatatcttttgaagtccatacgttgcaatggttgtctcattcgtaaaagaacttccaatccccagcagcagacctgctaccggaagaatcgcgatcggaagcataaaggatcttccgattcgctgtaaaacaccaaaaatcttgtctttcattttccacttctccttttctctgtttttgatgcatttgatcttgatggatagtatttcagatttcatgcccgtgcatcctatttccagagaaaaacagaaaaaaagacaccaacccacataaacatctaaaataaagtccatgtaaggttaatgcctgccgtacagttacacacctgatataaattcattatagtcagtgtccctttgattgtcaatttctttttttgccatattatcgattttttctgttactgcgaacagcaacttccttctctcagctttggccagattgtaagcaacatggttacaaaacatgccgtaccgccaataacattggaaatcggttctgcccaaaacactccatctgtccccagatttccgatcattggaagcagcatggtcaacggaatgacaatgatgacctttcgaaacagagaaaaaaagacggcctgtttcgcacggtttaacgcaaccgctgtagactgtcccgcaaactgcagcgccatcataaagattccacaaaaatagatccgcatggcagaaacaccgtactgcaaaattcccggttctttggtaaacatctgaagaaagaaacgaggttctaaaaataacactgcccagacaaccgttgtaaaaacaatacatccgaccgcagtaaaacggattgcagattttactctctgataacaccctgccccgtaattatatccaatcacaggctgcgatgccgccgtcagtcctgtcaccggcattgtcacaatttcccgcaccgagttgatcactgtcataatcccaacgtaaatatcacccccgtacctctggagcgttgcattacacacaatctgcacaagcccgtttgtaacagacatcacaaatcccgatgttcccagaaagatgatttcttttacaagcttccactccagatgcattgctcttttggagagtcgaagaatcgccttcttccctgtcagaaacttcatcacccaggctgcagataagccctgggagatcaccgttgcaagggctgctccctgtactcccatatccagtccgaaaatcaggatcggatccagcacaatattggtaaatgcgccaagcattaccgtgagcattccgattttcccaaatccctgagaattgatgaactgattcatccccagactgatcatgacaaacacggttccgcacagatagatactgatgtatgcgtttgcatacggaaatgtcgcactgctcgctccaaacagatacaacagcggttttcggaatataagaccgattcccatcagaagtccccctgtgaaaagaagcatcgaacacgaatttcccatcaccttctctgccttttcttcttcatggctgcctcttgcaatggaacaaaggggtgctcctcccattccaaataaattagcaaatgccgtgatgattgtaataatcggaagtgccagaccaattcccgtcagtgcattcgcagatacgccctgtaagtgtccgatatagactctgtctaccacactgtacaggacattgatcagttgtgccagcgtcatgggaactgcaagatttaaaatattctttgcaatgcttccctgactgaaatcattttctctttccatagtatttccttttgcacgcctcctcacgccgactgctcaacaagaacagccagatacttgtgcaagcacaatatctggctgttcttattggggtgagcagctttccgcctttcactgtccttagttgttgatcagtttatcttcatcactccagctgtagagttttctgatttctgctcctactttttctgatggatgttcagatgccagttttctcattgctctgaagtgtgcctgaccaccggctggtgacatatcaagcaggaagtcttttgcaaatgttccatcctgaatatcggaaagaatttttttcattgctttctttgtatcttctgtgatgatctttggtcctgtaatgtaatcaccatattctgctgtattggaaatagagtatctcattcctgcaaatccggactgatagatcagatctacgatcagtttcatctcatggatacactcaaagtatgcatttcttggatcgtatcccgcttcacacagtgtctcgaatcctgcctgcatcaatgcgcatacaccaccgcaaagtactgcctgctctccgaaaaggtctgtctctgtctctgttctgaaatctgtctccagaagtcctgctcttgctccaccgatcgcaagaccatatgcaagtgcacgatccagtgcttttcctgtgtaatcctgctctactgctaccagacaaggagttcccttaccagcctgatattcacttcttactgtatgtcccggtgcttttggcgcgatcatcgtaacatctacatttgcaggaggtacgatctgtccgaaatggatcgcaaaaccatgtgcaaacatcagcatgtttccttcttccaggttcggctcaatatcatttttatacattgcagcctgtttttcatcattgatcagaatcatgatcacatctgcttttttcgctgcctctgctgctgtaaatacttcaaatccctgtgcttctgcttttgcccaggatttgctgccttcgtaaagtccgatgatgacgttgcatccggattcctttaaattcaatgcatgtgcgtgtccctgacttccatatccgataatcgcaattgtctgtccctctaatacggaaaggttacaatcttcctgataataaagttttgctgccatttttcattcctcctaaattttctgcactgccgcagttttctgtttttatagttaaaggctcctgcctttagcatactgttttcatctagccaatatatgtaacatcttcacagcctctggacaatcctgtgataccggttcttgccagttccagaatctcataccctttcagaaggttcataaagccttccagtttggactgtgtccctgtcagttcgatgatcatggactcctcctgtacatccacgatcttcgcacggaaaatatccgcaatggaattgatctcacctctctgtgctgctgtcacgcgaacctttatcataatcagttcgcgaaatacagattctccatcctttaacagcttgatctcaatgacatcttccagttttctgacctgattttcaatctgcgataaaatcagctcgtctccggatgccaccactgtaattctggtaaatctcggatctgccgtcgttccggctgtaatactgtcgatactgtatcctcttcggctgaacagacctgcaattctgctcagaacacccggattgttatcgaccaaaagagaataaacctgttttctcatactttgtttcccaccttcttttaaaaaccgagtgcgttctgttttttattatattagcaaagcgcacttccgttgtcaagctttttttcgataaagtgtaaaagtgcctctatcaatttgttttattgagcttccttcctaagtatctctttcggaggttcaatttcatatgcgatcgtatgctccgtcagttctgacaatcctttgagtttcttgttgatcaattctctcatgcaattgggaacatgctcctgatgtgccctgtgaattgccacgcactctttacagtttccatgataacggcaggcctttttacacggacagtgatctttctctttatattcttctcgaaaggctgcagcaaactcctcctgtaatcgaagcccttcctttcggttgcccttatgaaattctgccatggctgccttttctttttcatttccttcaatgatcatctacgcttctcctttttgtattttattaaagatgaattttaaaatctccaaaatcaaagattccgcttccctgtttccacttcttttctttgtctaattttctgcatgcactttcaatcctgtctgccaaatctgttgaaatcgaaaagctgtgatgtcccggtgaatgtcccggggtatgaacaacttgcaccgttcgttctcccagattgaaaatttccccatcagaaaacgtactctgcacatctccttgaaataactgatacttttccaaatcaaattcttctggaaactgacactcccggcaggtcagattccttttcacctgctgcagcgatatcggaaatttctctgatatccaatctttctccaaaatgtggacgccaatattttcaaaatattgatgtcctcctatatgatcccagtgaacatgagtcgttacaacaaagattggaagcattgtcagtttatcaacaacttctttgatattagccactcccaaacctgtatcaatcagaagtgctcttttcgtgccacacaacagataacaatgtgtttcttcccagtgctgatattcactaattgcatatgtatcttcatcaattttttctaccgtaaaccagtccttcaccctgattcctccttcaaatattcatcacatatctggattcaggaagcccaaaccattccggcaacacttccattcttttattatacttgtttcttctatatccaggcaactatatccaaaatatttccctttaaaatcagcaccttttatggtatactgctcgaaacaaaaacagcagaattgatacgcgaaggaggacttatatatggagcatcaaggaacaaaaaccattgagacagaacgactgattttaagaaagtttactgcggatgatctttctgcgatctttcataactggaccagtgacgaaaaagtaaccgaatttttaagatggccaacgcacaaaagcattgacatcaccaaacgagttctggaaagttggcttttggagtacgaaaaaccagacttttaccaatgggccattattccaaaagaaatcggcgaacctatcggtaccatttctgtaattgaactaaatgaaaaaacagaaaaagttcatatcggatactgccttggcagccgctggtggcactgcggatttacaagcgaagcctttacagcagtcattgcctttctttttgaagaagtaaaagtaaaccgaattgaaacctggcacgatccccaaaatccaaattccggaaaagtcatgcaaaaatgcggcctgatttatgagggcactttaagacaagccgactggaataacaaaggaattgtagatgcctgtgtatatggaattctggcatctgactaccgggccaacaaaaagtaatcgaaaaaggaagatgcaccacacacagtacatcttccttctcttatcttgctttatgatctgtatccatccggatttgcagactgccatctccaggaatcttcacacatctcttcaattccgcgttctgccacccatccaagctcttccttcgcttttgcagcatcacagtagcatgttgcaatatcaccggcacggcgaggtttgatttcatacggaatctccttgccgcatgctttttcgtatgctttcacgacatccagtacgctgtatccaacgcctgttcccaggttgtaaatgtgaacacctttcgctttcttcattctctcgatcgcttttacatgaccgatcgccagatcgactacatggatataatctctgacacctgttccatccggtgtattgtagtcatcgccaaacactcccagacgatccagttttccaactgcaacctgtgcaatatatggcaccagattgttcgggattcctttcggatcttctccaatctttccggatttgtgtgccccgatcgggttaaagtaacgaagcagcataatattccactccggatctcctgtgtgaagatctgtcagaatctgctccaacattccttttgtacgtccgtatgggttggtgatttctcctttcggacacttttctgtgatcgggatctctgccggatctccgtatactgttgcggaagaactgaagatcatgttcttgcatccgtgttttctcatcacatcacaaagaatcaatgttcctgtaatgttgttgtgatagtattcccaaggcttttctacagattctccgactgctttgagtcctgcaaagttgatcactgcctcgatctcttcattttcaaagatcggctccagatcttctctgtttaaaatatctcctttgtaaaatttcaaagtttttccagtgatctcctgcactctttccagcgcaacttcactggaattgtaaagattgtctactactactacctcatatccacgttccaaaagttccacacatgtgtggctgccgatatatccggctccgcctgctactaaaattgccatgatctgactcctttctgattctgcttttcctgcaattatttatttccacagatttttcggatagattccttcctctttcatactgcggattgcattcacaactgtttctttatcttctttatatgtaactccataccatctgtctgctgatttgagcacttttacttcggcttttccttctccgatcagatcgcctacgactgccggaagaaagtattcgcatttcatcggattcttctccagattctctgtcaaaaatgcggaaaatctgctctccagttcctttaacatactcgcagtaaatccaaacaggttcatggaaactgtcgtatccaatgctacaggaacccatgtcttgccatcatcctctgtaaatgctgctccgtcttttgtcttctcgatgtgtgtacgctctgtaatacctgtcaggcactgattctcatctgtgtcacagattccacgggaaacatatccgttctctgtcagcgtattactcagcatatatccaaccattgcataacggtacttctcattgtcttctcctgatgaaagatagtcatagatcatcttatatgcattgactccatagtaatcatctgcattgatcacggcaaacggaccatccactacatctttacaactcaaaatcgcatgtcctgttccaaaaggcttcgttcttccttccggtacagaaaatccttccggcaggttctccagttcctggtatacatattctacttccatgaacttgctgactctgtccccgatactctttctaaagtcttcttcgtgctctcttctgataatgaagacaactttttcaaatcctgctctttttgcatcataaattgaaaaatcaatgataatatgtccatcttcatctaccgggtcaatctgtttcaaccctccatatctgcttcccattcctgctgccataatcactaaaacaggctttttcatatcgtttacctccatatttttcaatttcccttctgcaaggattagtatattcctttccttggtttacgtcaataaaatacaacataaatacatgtacctttttctgttcgtatattagcttatcattgtcctgtttttcaaaaaacaacaattttccatttttctttacttttttcaaacaggctgtccgtttttctggctctcgatcttttctgccaggtcgctaagataaacccagcgttccattttttcatctaacgctgcctgtgtttcctctttttgctgtaccagttcggaaagttttaccgagtttgttgcatttttcagaatatcctgctccagtttctccaactgttcctccagagatgcaatatcatcatcgattgtctcgtattcccgtgcttctttaaatgagaattttaattttaccggactgttctgtttccatgtttttgcagtatttttggactttgtcatctctggcttttcttccggctgcactgcatgcgatgctcttttctttttcgcttccagataatccgtatatccgccctcatactgctgcagatgtccgtttccgtcaaactcaaaaatccgatctaccacattatccaaaaagtagcggtcatgggaaatcgtgatcacaatcccctgaaaggaattcagataatcttccagaatcgtcagtgtcggaatatccagatagtttcccgcttcatcgatcagaagcagattgatattctgtgccagaatccccagaagatacagtcttcttttctctcctcccgacaatttcccgatcggcgcatattgcatatccggagtaaacaaaaaccgctccagaagctgcgatgcgctgattctgccatctctggtgacaatatattcgccgatctctttgacatagtcaatgactctctggctgtcatccatctcctgttcttcctgtgcaaaatatccgatcttgacagtctctcccacttcaatcgtcccggaatccggctgaaccagccccgccatcattttgatcagggtcgattttccacagccgtttggtccgatgattccaagcttttgatttttgagtactgtataagaaaaatctctgaccagtaccttttccccatatgatttactgacatggtgaagctccatcgtcttctttcccatgcgggtttctaccgaatccagcgtgatcgtatcatctgtcaccggagcactgccgtttttcagactttccagacgctccagacgtgctttctgcttcgttgttcttgcccggcatcctcgttttgcccattccagctccatacgcaggatgctctgccgttttcgctcggatgccagttccatctcctccctctgggctttcagttccaggaacgttgtgtaattggcatcatagctgtacatctttccatggctgatctccagaatccggtttgtgacctgatccagaaaatagcggtcatgtgtgaccataatgaccgttccacggtatgcccgcagatacccttccagccaggagatcatttctccatccagatgattggtgggctcgtccagaagaagcagatcaaagtcctctgccagaacctttgccattgccactcttctcttctgtccgccggaaagatgctcaatcttcattgtatgatctgtgattccgagtgtattcagattgctctgtactctccactccatatcttctgccacactctgcacataagataaaatagtcgcgccttccggaaatacgggattctgagtcagatgggcaatcttcatgccattctgccggatgatctgtccatcatccggcacctctgttcccgcgatcatccgcagaagagtcgtcttgccggtcccgttgatcccaacgatcccaatcttgtctccctcctgcactccaaaagacgcgtcatcaaaaattattttttctccatatattttactgatatgttcaatatttaacaggttcatatgctaactccattgtctttcattagattctgctgtctttttgacaacactctaactttatcacatttatggaggtaagtcactcttttcattccagaaatgtatcctgcagctttactcctgtttcattgagcatcgcgattaaaagtccgtattcaaactcctggatcggccgcctttcctccagaaggattcccatcacacctttgacgtctcttgcatcctggatcggaagatacatggctttggcgtcaggcagtgtgtgcgtacatgctcccgcacgatgatgattcgccgccacccactgtgccactgccagctcctgccggttgatacaagttttcagatgcagcatatccatcccttttcttggaaacaaaagcggcgtatctgacatccgagatccttccatcggataaatgatcagagacagatttaaaagctttcctgcctgcccggccacctgagtccacacttcctgtttcgatttacatcttcgaagcttctgactgttctcgagcagaatctccgtccgatatgcctttttggcactttctctgctctgctgtttcagtctccttgtcagtgtcgctgtgaacaatcccaccagaaacaacatcacaaacgtagtcggatatcctttgtcatatgccttcagactgaaatatggttccgtaaagaaaaaattaaatgcaaacacactgatcaaagaagaatacagcgcataaattttcttatttgcaatataagaggacagcagaatccccagaatataaatcatgataatgttggattccggcagtctgaaaagccacagcacgtaagctgcaagtgttgcaactgccatcactcctgtaatttcagccagatccagaaacacgtttttccagctcgtttttctgcgcctttggatctgcacctctcttttatgcgttgccttccggatatccggaataatatagacatcaatattgggcgccatatgggtcagcttctccatcacttcgatcctaggcctgcgccagattcccctgtggtttgttcttcccatgaccactttagagacattgctcacgatcgcgtattccgcaatctgatacgctgcatcctcaccatacaccgttacgatttttgctcccagcgcctttgccagttccagatggctttttaaggtttgtttcgtcttctctcccgcttcctgcatggcaggtgtttccacataaagtgccgtaaactgggcatgaaaagcataggaaagtctggctgctgtacggatcaccttggcgctggatggcgcagcggaaatacatgccagtatatgttctccggtatgatagccggtatttcccagaatatttctctcttcctccgcaatccggttcacccggtccgcacttcttcgaagtgcaatttctcgcagtgccaccagcttttctcttcggaaaaaattctccagcgcccgttctgcctgcaccggaccgtagatctttccttctttcatacgctcgatcaggtcttccggctcaatatctatcacctctacctgatctgcctgatcaaacacactgtcaggaacacgctcttttacttctatattcgtaatattccctaccagatcattgaggctttccagatgctggatattcatcgtggtatatacattgatccctgcgcgaagcagctcccgtacatcctgatagcgcttttcattccggcttcctcggacattggtatgggcgagctcatccaccaggatcagctttggttttcgctccagcgccgcatccagattaaactcacgaagctggattcctttataatcgaccataaggggcggaatttcttccagcccctctgccattgcctgtgtatccggacgtgcgtgcggttcgatataacctgccactacatccacctgatgcttttttgcctcatgggcagcttccagcatggcgtatgtcttaccggatcctgccgcatatccaagaaaaattttcagttttccctttgtctgtttctctttttccttctcctcgtactgtagttttttcaacagcagccccggatcaggtctgttttcctctgtcaaagcaacctcctattttcccattgccgctgcaatatccagattacatccaagtacatttacccgttcttctccaaatacacccagtgttttcttttctgtattttcttctacgatcttttttacttcctcctcagagagtccggaattctttgccactgtcgggatctgaacctctgcagattccggactgatatgtggatccagaccggaaccggaagctgtcagaagctctgccggaacatcctctgctttcactcccggatgctcttttaagaactgctccagatctttctccatccgctcttttaattccggattggaatttgcgtagttataagaaccggaagcaacacctgcatattctccgctttctttctgctcttctgtataagtattgtaatttacagcggaaactcttccttgaaaataacagtcctctgtaaaatcctgcccgatcagcgcagaacctaccgcctctttggtatctgttgtaaggttcccatatttgtcaactttacttccatctgcctttgccttcattgtaagctggctgacccctgccaatgccagcggatacacaaatgaacacatcagcatcataacaagacagaaaacaactgtttttcctactgtttttccaaatgctttcatagtctgcttcctcctacattccgatcattgcaagcagcggtgctaccagcaggtcgatcagtttaattcctacaaacggtacaacaattccgccaagtccgtagattcccatattacgaagcagcattttctctgctttcatcggtctgtacttgacacctttcatcgcaatcgggatcagtcccggtataatgatcgcattgaagatcaaagctgaaaggatcgcacttgccggcgtagaaagatgcatgatattcaagatctgcatctgtggaagtaccatcgtaaacatggccgggataatggcaaaatattttgcaatatcattcgcaatactaaatgtggtcaaagatcctctggtgatcaaaagctgttttccgatttccaccacttccagaatctttgtcgggtctgaatccagatccaccatatttgctgcttctttagctgcctgtgttccggaattcattgccagaccaacatctgcctgtgccagcgccggagcatcgtttgtaccgtcacctgtcatggcaaccacttttccttctgcctgctcttttttgatcgcctcaattttatcttccggtttacattctgcaataaaaccgtcaactcctgcttccttcgcgatcgttgctactgtcagcggattatcaccggtacacatgattgtcttgattccgatctcgcgaagtctttcaaaacgttccaccagtcccggttttactgtatccttcaaataaatcacacctaaaatcttgttgtttacgcatacaacaagcggagtacctccaagatttgaaacttctgttacaatcccttccagatccggcgggataattccgcctgcttctttcacaaaagtcttgattgcttcggaagctccttttctgactctggttccgtcttttaaattcacaccgctcatcttagactgtgcagtaaactctacaaagtccatctggtctgctgcgccatcgtcgatcgcacagccaaaatttcttcccagttctactgtagattttccttccggggtggcatccatcaaagaacacatcacacaataatctgtcagatcttcttttgcaacacccttgaccggataaaattctgctgccaggcggtttccgtatgtaatggttcctgttttgtcaagaatcatcgtgtccacatctccgcatgcctcaactgcttttccggacatggcaattacattgaatctggtcacacggtccattcccgcgattccaatagctgaaagcagaccgccgatcgttgtcgggatgagacataccatcagagcaatcagccaggaaatcggcatctgtactccaagatactgtgcaaacgggtacagagatacgatcacgatcagaaaaatcaaagtcagcacgatcagcagtgtgttcagcgcgatctcattcggagatttctgtctggatgcgccctctaccagtgcaatcattttatccaggaaagactgtccgggttctgccacgattttaatctttaaccagtcagaaacaactgtcgtacctcctgtcacagaggaaaaatctcctcccgcctctcttgtaacaggggcggattcccccgtaattgcagattcatctacagatgcaacaccttcgatgatctctccatcgttcggaatcacctctccggtctttacaagcacgatatctcctttttttcagttcagaagcattgatcactttctcttctccatttgccagaagcagtcttgcttttgtatcctgctttgtctttttcaaagaagctgcctgtgcctttcctcttccttctgcaacggactctgcaaagtttgcaaataacacggtcacaaacagtacgactgttacaactccgttgtacacgcgatattcttcacttccgccgaacagtgttggaaacactgtcaggaccagagtgaacagaaatccgatttctacaacaaacatgaccggattttttatcatgtagcgcagatccagtttttgaaatgcgcccagaatggaggatcttaaaatatcctttgtaataaattttgtcttatctttcttagccatgttggattctcctttccgctcattttctactgccataaggacagatgctcagctaccggtccaagtgccagcgccgggaaaaaggtcagagcggcaaaaatgtatacaataaatacaagaatgatcataaaagttacattatctgtcttcagcgaaccgattgattcgttcactttctttttcgccagcagagatcctgcgactgcaagctgtgctacgatggaaaaatatcttccaaagaacattgccagcccggtcgtgatattccagaatacactgttgtcggccagtccctcaaatccggaaccattgttcgccgcagaagaggcaaactcgtacagaacctgactcagtccgtgatatcccgggttcgtaatgccgcttgttcctgtctgtgttgccacacccaatgcagaaaatccaagaattaaaagtggatgaatcaaaatcacaagcgccaccagcttcatctctctgccttcgatctttttattcagatattccggtgtacgtcctaccatcaggccacagatgaaaactgccaggatcacatacataaccatattcatcagacccacaccttttccgccgaacacacagttaagcatcatgtggagcattggaacaagaccgccaagcggtgtcagtgaatcatgcatgttgttaacagttcctgttgtaaaggatgttgtcaccgttgtaaataatgcagactgcgcgattccaaagcgagtttcttttccttccatatttcctgcctgtgcaagtcccagtgaatgagtcaccggattgcctgccatctcagcagaatagcagattacaagtcctactacaaaaaggatggacattgctccgaaaatcactgctgcctgtcttcccatcagcattggcttgccaaactgttttggtgcaactgcttttctcgccgcattttcttttctgttgtcatggatcatatggccaaatgctacaacgcaagagcccggaagtatcatcatggaaatcgtttctattatattagaaataacagtcgggttctcaaacggtgtcgctgagtttgcaccgaagaatccacctccgtttgttcccagatgcttgattgcttccagtgcggctaccggtccaagtgccagatcctgcatctttccttcgattgtctgtatcgtttcatttgcctgtaatgtctgcggcactccctgacttaccagaagaagaccgattacaaacgaaaacggaatcaggattctggtcgtcacgcggatcacatcttcataaaagtttcccatctttcttccggaaactcctcggcaaaatgccatacatgctgcataaccgctggcagctgaggtaaacatcataaaaatgatcacacacaactgacttccgtaagaaagaccgctttctcctgcataatgctgcaggtttgtgtttgtcataaaactgatgatcgtattgaaggaaagacttgcctccattccatcagctccgttcggatttaaaaacagcaaattctgtaatcgtaaaatcaaatagccgataaataccattactgcatttgccagtactaaagacatcgcgtactttttccagcccatgtcttctcgtttgattccgcaaattttatataaaaaattgtcgatcggattgaacaccttatccgcaaatgttttttgctttgtggcgatgtgatacatatattttcccattggaatgaccagtatcaagaaaattgccagtgtgagtataatctgtaacatctctcttcctcctgttgctgtcctttctcttttctcacaatttctccggatgtatcagcgcatacacaagatatccggcaagtaataaaactaaaattccaagaacgatcatctttatatcctcctatttttcttttggattgatcagcgattcacaaaaattcgcaaataattttacacatccaaaacaaataattaaaattcctagtgcaattaaatccatcatatttttttcctccttgctgttccctattgtaggacattgcaaataaaatctgtattaagctgaaatggattcgtataaagatggtataaagattcgggtggaaaaagggggattgtgaaacaccttctcttgaattagcatttaaaattgcagaagtatttgaggtttcgatcgacaaaacttttgaatataggaaggggaactaatatgaataaacaaactataattttattttttcttattgtttcattaggtgtaacactcagcctatatatttttaaagctaagaaacagatgaattatatgggggatgaacggtggaaaatgatacaactaaaatcatacagaattgccagtatctccacttgacttttaataatagtacttttaattttgcccattttcgtagacagccaatctacaatcaccatacaaagactaaccattttttgtctattttacattggagcccgcaattttcttgaactttctgcaataatatattttgataaacaattataaataggttttgaactcagtagatatggacgctccgccttctggaagaaccgtcgaattgcttcctgcattttttatcgcggttaatattctggcattgacctcttcgtcccaaaagtataccttgttacatttgcagattcccccgaaatcttaagaaactcagtggctttttataacattctatagtatgctaaaaacaaaaaggagttttgcacaatgtttcacaacaaagtagttgtcatcacaggcggcgcacaaggtattggaaaatgtattgccgaagaatttaaaaagaacaacgcttttgtctgtatcatcgacaaacagccaaatgattactttgtcggcgatttggctgaaaaagaagttctgcaccgctttgtggaaacagtaattgctgactatggcaaggtagactatctgatcaataacgcactgccgctaatgaaagggatcgaggaatgttcctatgaagaatttaactacgctttaaaagtaggcataacagcgccattctatcttacaaagctttttcttccgtactttgctcctgatgcggcaattgtaaatatctcttcctcccgggaccgtatgagtcagccacagactgaaagctacactgctgctaaaggcggtatagcagctcttacgcactcccttgctgtcagtcttgccgggaaagttcgtgtaaattcaatatctcccggttggatcgataccgcttacacaaaatatgacggtgcagatgtgattcaacaccctgccggccgcgttgggaattctctggatattgccaatatggtactatacctttgttccgataaagcaggttttatcactggggaaaatatatgtattgacggcggcatgacgaagcagatgatataccacaatgattatggatggactctgaatcaggaaaataattgagaaagaggggcgtatcacaatacatgatacccccactttgaaaccttaagtattacattttccgaacacaaccacttctgatttactgatatttttcattctataaaatcctaatctaaaatctttccgccaatcgaaactgtcacgacctgccatggaataaattttccgctgttttgcagtgctttctttgccgccatttccagacctccgcagcatggcacttccatacgaagaattgttacactctgaatctcattttccgcaatgatctgtgtcagcttctcactgtaatctccttcatccagcttaggacatccaataagtgttacttttccacgcataaactcctgatgtacatttgcgtatgcataagctgtacaatctgcagcaatcaacagtttcgccccattaaaatacggtgcatgtaccggaaccagtttgatctggcatggccactgtgccagctgtgacgactgtgcggcacacttttgctcggtattatgaccgctttctggatgaagctgtctcattcgctgtcccggacagccggaaaattctgtcgttgactgctctgctttttttctctggttttccagcactgcctgctcatcgtatggggcagcctcccgctccacaaaacggattgctcctgtcggacactgcggcagacagtcacccagaccgtcacaataatcatcccttaacagttttgcctttccatcgaccatcccgattgcaccttcatgacatgcagctgcacagactccgcatccgttgcatttttcttcatctatctgaataattcttctgatcatcttgattcctcccttgtttttgtagttcaagtatagtacaatcaaggcaatatttcggttgttataaccacagaaaggaagattttatgaaaaaagttcagacccctctgtttcagggaattacagaaaatgaatggaacgaaatgcaaaactgcagttgcatgcgtcagcagtcttttgaaaaaaatgaacttatttttcgaatgggagaatccgtccgagaaatcggaattgttctgacgggaagtgttaatatcgaaaatgtagatctctggggaaataaaagtctgctgagcaacatctcggcaggacaagtatttgcagaaacctacgctttttgtcaggagcctttgatggtgaatgcagtagccgctgaatatacaaatcttcttttcctgaatctggagactttgatgcagccccgctataaagatactctctggacggacaagatcatgcagaatctccttcgaatttccatttacaaaaatctcatcctgtccaaccggattttctgcacaaccccaaagaccatccggggacgtctgctgatctatctgtcctctcaggcgtccaaagccgaaagcacggtctttcaaatttcttttaaccgacaggaactggcagattatctcaacctggatcgcagtgccctctcgaaagaacttggaaaaatgcgcgacgaaggaattctggaattccgcaagaatcaattcgttcttcaccagctgccggagtagtctgttctctcagactacttcccatctgtaaacctatacctgatcagatgagatgaagtccacctctgaaagtacgagttgcggaatgtccggatcgctatacctctttcactgttacagttacctgatctccaggctgttttccaatcttgtttctaatttcttttcggattccaataatataacaaatgctaccgtctggatttttaactcccatatttacaatattagaatttagagagtaatactcgtttctatgtttcatagagatgaaaacaaagcggggctgccatcacagccccgtaaaaactcactttgtcactgcgccacccgcaacatacgatatccaatccccacatgtgtctggatatatttcggctgagatggattttcttcaatcttctttctgagcgttgccataaacacccgcaaagaagctacatcattgtcccaggcacttccccagatttctttcgtaatatatgtatgagtcaatacctttccaacattttttgaaagcaaaatcagaagtttatattccgtggatgtcatatgcagttcctgcccctttaaatacacacagccagacacataatcaatccgcaggtctccattgacaaattctttttcttcctgagatgagctggattccatatactgaagtcttcgcaggatcacacgcagtcttgccagaagctcctctacagaaaacggcttggtcagatagtcatccgcacctgcatccaacgcctcaatcttatccctgtcttcactccgcgcactgatcactataatcggcagatttgaccaggaacggatttttttgatcacttccactccatccatgtccggaagccccagatccagaagcatgatatccggtttctgagacgctgcttccaaaattgcctgagcaccgttggccgccgtatggaaacggtaatcctgtgtctctaatgtagttgtaatcaagtttcttactgctgtatcatcttctaccgctaaaatcaatggtttattcattcaaagtaacctcctctgcctgcagtgtaaatgtaaaaatcgtaccatgtggaacattatctgctacctgaatcgttcccccatgcgcctgtatgatcgacttacagaggaacagccccagtccaagacctcttctgctgtctgcaactttactgtctgcagtataaaacatatcaaaaatcttttcttttgcacaatccgcaattccttttccattatctgcaatggaaatcgcgatcatctgattttcttttcttgcatagatctctattttagagtctttcggcgtatatttcaatgcattgtccacaatattaataataacctggatgatgagacgggaatccatttttgccagaagcagctcttccgaatgaataaatttcaattcatagtccgaatgatcccggctgatgtgtttcagcgccccctcaatcacctcatccaccaattcgatctgcagattcagattcatagtcccgtctt
